(19) United States
(12) Patent Application Publication
(10) Pub. No.: US 2004/0018971 A1
(43) Pub. Date: Jan. 29, 2004

(54) Inducing cellular immune responses to her2/neu using peptide and nucleic acid compositions

(76) Inventors: John Fikes, San Diego, CA (US); Alessandro Sette, La Jolla, CA (US); John Sydney, San Diego, CA (US); Scott Southwood, Santee, CA (US); Robert Chesnut, Cardiff-by-the-Sea, CA (US); Esteban Celis, Rochester, MN (US); Elissa Keogh, San Diego, CA (US)

Correspondence Address: STERNE, KESSLER, GOLDSTEIN & FOX P.L.L.C., 1100 NEW YORK AVE., N.W., WASHINGTON, DC, 20005, US

(21) Appl. No.: 10/149,138

(22) PCT Filed: Dec. 11, 2000
(86) PCT No.: PCT/US00/33591

(51) Int. Cl. A61K 38/17; C07K 14/74; A61K 9/127

(52) U.S. Cl. 514/12; 530/350; 424/450

(57) ABSTRACT

This invention uses our knoeledge of the mechanisms by which antigen is recognized by T cells to identify and prepare HER2/neu epitopes, and to develop epitope-based vaccines directed towards HERS2/neu-bearing tumors. More specifically, this application communicates our discovery of pharmaceutical compositions and methods of use in the prevention and treatment of cancer.

### I. BACKGROUND OF THE INVENTION

[0001] A growing body of evidence suggests that cytotoxic T lymphocytes (CTL) are important in the immune response to tumor cells. CTL recognize peptide epitopes in the context of HLA class I molecules that are expressed on the surface of almost all nucleated cells. Following intracellular processing of endogenously synthesized tumor antigens, antigen-derived peptide epitopes bind to class I HLA molecules in the endoplasmic reticulum, and the resulting complex is then transported to the cell surface. CTL recognize the peptide-HLA class I complex, which then results in the destruction of the cell bearing the HLA-peptide complex directly by the CTL and/or via the activation of non-destructive mechanisms, e.g., activation of lymphokines such as tumor necrosis factor-α (TNF-α) or interferon-γ (IFNγ) which enhance the immune response and facilitate the destruction of the tumor cell.

[0002] Tumor-specific helper T lymphocytes (HTLs) are also known to be important for maintaining effective antitumor immunity. Their role in antitumor immunity has been demonstrated in animal models in which these cells not only serve to provide help for induction of CTL and antibody responses, but also provide effector functions, which are mediated by direct cell contact and also by secretion of lymphokines (e.g., IFNγ and TNF-α).

[0003] A fundamental challenge in the development of an efficacious tumor vaccine is immune suppression or tolerance that can occur. There is therefore a need to establish vaccine embodiments that elicit immune responses of sufficient breadth and vigor to prevent progression and/or clear the tumor.

[0004] The epitope approach employed in the present invention represents a solution to this challenge, in that it allows the incorporation of various antibody, CTL and HTL epitopes, from discrete regions of a target tumor-associated antigen (TAA), and/or regions of other TAAs, in a single vaccine composition. Such a composition can simultaneously target multiple dominant and subdominant epitopes and thereby be used to achieve effective immunization in a diverse population.

[0005] HER2/neu (or erbB-2) is a 185 kD transmembrane protein with tyrosine kinase activity that has a structure similar to the epidermal growth factor receptor (Coussens et al., Science 230:113-119, 1985; Bargmann et al., Nature 319:226-230, 1986; Yamamoto et al., Nature 319:230-234, 1986). Amplification of the Her2/neu gene and/or overexpression of the protein have been reported in many human adenocarcinomas of the breast, ovary, uterus, prostate, stomach, esophagus, pancreas, kidney, and lung (see, e.g., Slamon et al., Science 235:177-182, 1987 and Science 244:707-712, 1989; Borg et al., Cancer Res. 50:4332-4337, 1990; Lukes et al., Cancer 73:2380-2385, 1994; Kuhn et al., J. Urol. 150:1427-1433, 1993; Sadasivan et al., J. Urol. 150:126-131, 1993; Yonemura et al., Cancer Res. 51:1034-1038, 1991; Kameda et al., Cancer Res. 50:8002-8009, 1990; Houldsworth et al., Cancer Res. 50:6417-6422, 1990; Yamanaka et al., Human Path. 24:1127-1134, 1993; Weidner et al., Cancer Res. 50:4504-4509, 1990; Kem et al., Cancer Res. 50:5184-5187, 1990; and Rachwal et al., Br. J. Cancer 72:56-64, 1995). This widespread expression on cancer cells makes HER2/neu an important target for immunotherapy.

[0006] The information provided in this section is intended to disclose the presently understood state of the art as of the filing date of the present application. Information is included in this section which was generated subsequent to the priority date of this application. Accordingly, information in this section is not intended, in any way, to delineate the priority date for the invention.

### II. SUMMARY OF THE INVENTION

[0007] This invention applies our knowledge of the mechanisms by which antigen is recognized by T cells, for example, to develop epitope-based vaccines directed towards TAAs. More specifically, this application communicates our discovery of specific epitope pharmaceutical compositions and methods of use in the prevention and treatment of cancer.

[0008] Upon development of appropriate technology, the use of epitope-based vaccines has several advantages over current vaccines, particularly when compared to the use of whole antigens in vaccine compositions. For example, immunosuppressive epitopes that may be present in whole antigens can be avoided with the use of epitope-based vaccines. Such immunosuppressive epitopes may, e.g., correspond to immunodominant epitopes in whole antigens, which may be avoided by selecting peptide epitopes from non-dominant regions (see, e.g., Disis et al., J. Immunol. 156:3151-3158, 1996).

[0009] An additional advantage of an epitope-based vaccine approach is the ability to combine selected epitopes (CTL and HTL), and further, to modify the composition of the epitopes, achieving, for example, enhanced immunogenicity. Accordingly, the immune response can be modulated, as appropriate, for the target disease. Similar engineering of the response is not possible with traditional approaches.

[0010] Another major benefit of epitope-based immune-stimulating vaccines is their safety. The possible pathological side effects caused by infectious agents or whole protein antigens, which might have their own intrinsic biological activity, is eliminated.

[0011] An epitope-based vaccine also provides the ability to direct and focus an immune response to multiple selected antigens from the same pathogen (a “pathogen” may be an infectious agent or a tumor-associated molecule). Thus, patient-by-patient variability in the immune response to a particular pathogen may be alleviated by inclusion of epitopes from multiple antigens from the pathogen in a vaccine composition.

[0012] Furthermore, an epitope-based anti-tumor vaccine also provides the opportunity to combine epitopes derived from multiple tumor-associated molecules. This capability can therefore address the problem of tumor-to tumor variability that arises when developing a broadly targeted anti-tumor vaccine for a given tumor type and can also reduce the likelihood of tumor escape due to antigen loss. For example, a breast cancer tumor in one patient may express a target TAA that differs from a breast cancer tumor in another patient. Epitopes derived from multiple TAAs can be included in a polyepitopic vaccine that will target both breast cancer tumors.

[0013] One of the most formidable obstacles to the development of broadly efficacious epitope-based immunotherapeutics, however, has been the extreme polymorphism of HLA molecules. To date, effective non-genetically biased coverage of a population has been a task of considerable complexity; such coverage has required that epitopes be used that are specific for HLA molecules corresponding to each individual HLA allele. Impractically large numbers of epitopes would therefore have to be used in order to cover ethnically diverse populations. Thus, there has existed a need for peptide epitopes that are bound by multiple HLA antigen molecules for use in epitope-based vaccines. The greater the number of HLA antigen molecules bound, the greater the breadth of population coverage by the vaccine.

[0014] Furthermore, as described herein in greater detail, a need has existed to modulate peptide binding properties, e.g., so that peptides that are able to bind to multiple HLA molecules do so with an affinity that will stimulate an immune response. Identification of epitopes restricted by more than one HLA allele at an affinity that correlates with immunogenicity is important to provide thorough population coverage, and to allow the elicitation of responses of sufficient vigor to prevent or clear an infection in a diverse segment of the population. Such a response can also target a broad array of epitopes. The technology disclosed herein provides for such favored immune responses.

[0015] In a preferred embodiment, epitopes for inclusion in vaccine compositions of the invention are selected by a process whereby protein sequences of known antigens are evaluated for the presence of motif or supermotif-bearing epitopes. Peptides corresponding to a motif- or supermotif-bearing epitope are then synthesized and tested for the ability to bind to the HLA molecule that recognizes the selected motif. Those peptides that bind at an intermediate or high affinity i.e., an IC₅₀ (or a K_{D} value) of 500 nM or less for HLA class I molecules or an IC₅₀ of 1000 nM or less for HLA class II molecules, are further evaluated for their ability to induce a CTL or HTL response. Immunogenic peptide epitopes are selected for inclusion in vaccine compositions.

[0016] Supermotif-bearing peptides may additionally be tested for the ability to bind to multiple alleles within the HLA supertype family. Moreover, peptide epitopes may be analogued to modify binding affinity and/or the ability to bind to multiple alleles within an HLA supertype.

[0017] The invention also includes embodiments comprising methods for monitoring or evaluating an immune response to a TAA in a patient having a known HLA-type. Such methods comprise incubating a T lymphocyte sample from the patient with a peptide composition comprising a TAA epitope that has an amino acid sequence described in, for example, Tables XXIII, XXIV, XXV, XXVI, XXVII, and XXXI which binds the product of at least one HLA allele present in the patient, and detecting for the presence of a T lymphocyte that binds to the peptide. A CTL peptide epitope can, for example, be used as a component of a tetrameric complex for this type of analysis.

[0018] An alternative modality for defining the peptide epitopes in accordance with the invention is to recite the physical properties, such as length; primary structure; or charge, which are correlated with binding to a particular allele-specific HLA molecule or group of allele-specific HLA molecules. A further modality for defining peptide epitopes is to recite the physical properties of an HLA binding pocket, or properties shared by several allele-specific HLA binding pockets (e.g. pocket configuration and charge distribution) and reciting that the peptide epitope fits and binds to the pocket or pockets.

[0019] As will be apparent from the discussion below, other methods and embodiments are also contemplated. Further, novel synthetic peptides produced by any of the methods described herein are also part of the invention.

### III. BRIEF DESCRIPTION OF THE FIGURES

[0020] not applicable

### IV. DETAILED DESCRIPTION OF THE INVENTION

[0021] The peptide epitopes and corresponding nucleic acid compositions of the present invention are useful for stimulating an immune response to a TAA by stimulating the production of CTL or HTL responses. The peptide epitopes, which are derived directly or indirectly from native TAA protein amino acid sequences, are able to bind to HLA molecules and stimulate an immune response to the TAA. The complete sequence of the TAA proteins to be analyzed can be obtained from GenBank. Peptide epitopes and analogs thereof can also be readily determined from sequence information that may subsequently be discovered for heretofore unknown variants of particular TAAs, as will be clear from the disclosure provided below.

[0022] A list of target TAA includes, but is not limited to, the following antigens: MAGE 1, MAGE 2, MAGE 3, MAGE-11, MAGE-A10, BAGE, GAGE, RAGE, MAGE-C1, LAGE-1, CAG-3, DAM, MUC1, MUC2, MUC18, NY-ESO-1, MUM-1, CDK4, BRCA2, NY-LU-1, NY-LU-7, NY-LU-12, CASP8, RAS, KIAA-2-5, SCCs, p53, p73, CEA, Her 2/neu, Melan-A, gp100, tyrosinase, TRP2, gp75/TRP1, kallikrein, PSM, PAP, PSA, PT1-1, B-catenin, PRAME, Telomerase, FAK, cyclin D1 protein, NOEY2, EGF-R, SART-1, CAPB, HPVE7, p15, Folate receptor CDC27, PAGE-1, and PAGE4.

[0023] The peptide epitopes of the invention have been identified in a number of ways, as will be discussed below. Also discussed in greater detail is that analog peptides have been derived and the binding activity for HLA molecules modulated by modifying specific amino acid residues to create peptide analogs exhibiting altered immunogenicity. Further, the present invention provides compositions and combinations of compositions that enable epitope-based vaccines that are capable of interacting with HLA molecules encoded by various genetic alleles to provide broader population coverage than prior vaccines.

### IV.A. Definitions

[0024] The invention can be better understood with reference to the following definitions, which are listed alphabetically:

[0025] A “computer” or “computer system” generally includes: a processor; at least one information storage/retrieval apparatus such as, for example, a hard drive, a disk drive or a tape drive; at least one input apparatus such as, for example, a keyboard, a mouse, a touch screen, or a microphone; and display structure. Additionally, the computer may include a communication channel in communication with a network. Such a computer may include more or less than what is listed above.

[0026] A “construct” as used herein generally denotes a composition that does not occur in nature. A construct can be produced by synthetic technologies, e.g., recombinant DNA preparation and expression or chemical synthetic techniques for nucleic or amino acids. A construct can also be produced by the addition or affiliation of one material with another such that the result is not found in nature in that form.

[0027] “Cross-reactive binding” indicates that a peptide is bound by more than one HLA molecule; a synonym is degenerate binding.

[0028] A “cryptic epitope” elicits a response by immunization with an isolated peptide, but the response is not cross-reactive in vitro when intact whole protein which comprises the epitope is used as an antigen.

[0029] A “dominant epitope” is an epitope that induces an immune response upon immunization with a whole native antigen (see, e.g., Sercarz, et al., Annu. Rev. Immunol. 11:729-766, 1993). Such a response is cross-reactive in vitro with an isolated peptide epitope.

[0030] With regard to a particular amino acid sequence, an “epitope” is a set of amino acid residues which is involved in recognition by a particular immunoglobulin, or in the context of T cells, those residues necessary for recognition by T cell receptor proteins and/or Major Histocompatibility Complex (MHC) receptors. In an immune system setting, in vivo or in vitro, an epitope is the collective features of a molecule, such as primary, secondary and tertiary peptide structure, and charge, that together form a site recognized by an immunoglobulin, T cell receptor or HLA molecule. Throughout this disclosure epitope and peptide are often used interchangeably.

[0031] It is to be appreciated that protein or peptide molecules that comprise an epitope of the invention as well as additional amino acid(s) are within the bounds of the invention. In certain embodiments, there is a limitation on the length of a peptide of the invention which is not otherwise a construct as defined herein. An embodiment that is length-limited occurs when the protein/peptide comprising an epitope of the invention comprises a region (i.e., a contiguous series of amino acids) having 100% identity with a native sequence. In order to avoid a recited definition of epitope from reading, e.g., on whole natural molecules, the length of any region that has 100% identity with a native peptide sequence is limited. Thus, for a peptide comprising an epitope of the invention and a region with 100% identity with a native peptide sequence (and which is not otherwise a construct), the region with 100% identity to a native sequence generally has a length of: less than or equal to 600 amino acids, often less than or equal to 500 amino acids, often less than or equal to 400 amino acids, often less than or equal to 250 amino acids, often less than or equal to 100 amino acids, often less than or equal to 85 amino acids, often less than or equal to 75 amino acids, often less than or equal to 65 amino acids, and often less than or equal to 50 amino acids. In certain embodiments, an “epitope” of the invention which is not a construct is comprised by a peptide having a region with less than 51 amino acids that has 100% identity to a native peptide sequence, in any increment of (50, 49, 48, 47, 46, 45, 44, 43, 42, 41, 40, 39, 38, 37, 36, 35, 34, 33, 32, 31, 30, 29, 28, 27, 26, 25, 24, 23, 22, 21, 20, 19, 18, 17, 16, 15, 14, 13, 12, 11, 10, 9, 8, 7, 6, 5) down to 5 amino acids.

[0032] Certain peptide or protein sequences longer than 600 amino acids are within the scope of the invention. Such longer sequences are within the scope of the invention so long as they do not comprise any contiguous sequence of more than 600 amino acids that have 100% identity with a native peptide sequence, or if longer than 600 amino acids, they are a construct. For any peptide that has five contiguous residues or less that correspond to a native sequence, there is no limitation on the maximal length of that peptide in order to fall within the scope of the invention. It is presently preferred that a CTL epitope of the invention be less than 600 residues long in any increment down to eight amino acid residues. “Human Leukocyte Antigen” or “HLA” is a human class I or class II Major Histocompatibility Complex (MHC) protein (see, e.g., Stites, et al., IMMUNOLOGY, 8^{TH} ED., Lange Publishing, Los Altos, Calif., 1994).

[0033] An “HLA supertype or family”, as used herein, describes sets of HLA molecules grouped on the basis of shared peptide-binding specificities. HLA class I molecules that share somewhat similar binding affinity for peptides bearing certain amino acid motifs are grouped into HLA supertypes. The terms HLA superfamily, HLA supertype family, HLA family, and HLA xx-like molecules (where xx denotes a particular HLA type), are synonyms.

[0034] Throughout this disclosure, results are expressed in terms of “IC₅₀'s.” IC₅₀ is the concentration of peptide in a binding assay at which 50% inhibition of binding of a reference peptide is observed. Given the conditions in which the assays are run (i.e., limiting HLA proteins and labeled peptide concentrations), these values approximate K_{D} values. Assays for determining binding are described in detail, e.g., in PCT publications WO 94/20127 and WO 94/03205. It should be noted that IC₅₀ values can change, often dramatically, if the assay conditions are varied, and depending on the particular reagents used (e.g., HLA preparation, etc.). For example, excessive concentrations of HLA molecules will increase the apparent measured IC₅₀ of a given ligand.

[0035] Alternatively, binding is expressed relative to a reference peptide. Although as a particular assay becomes more, or less, sensitive, the IC₅₀'s of the peptides tested may change somewhat, the binding relative to the reference peptide will not significantly change. For example, in an assay run under conditions such that the IC₅₀ of the reference peptide increases 10-fold, the IC₅₀ values of the test peptides will also shift approximately 10-fold. Therefore, to avoid ambiguities, the assessment of whether a peptide is a good, intermediate, weak, or negative binder is generally based on its IC₅₀, relative to the IC₅₀ of a standard peptide.

[0036] Binding may also be determined using other assay systems including those using: live cells (e.g., Ceppellini et al., Nature 339:392, 1989; Christnick et al., Nature 352:67, 1991; Busch et al., Int. Immunol. 2:443, 19990; Hill et al., J. Immunol. 147:189, 1991; del Guercio et al., J. Immunol. 154:685, 1995), cell free systems using detergent lysates (e.g., Cerundolo et al., J. Immunol. 21:2069, 1991), immobilized purified MHC (e.g., Hill et al., J. Immunol. 152, 2890, 1994; Marshall et al., J. Immunol. 152:4946, 1994), ELISA systems (e.g., Reay et al., EMBO J. 11:2829, 1992), surface plasmon resonance (e.g., Khilko et al., J. Biol. Chem. 268:15425, 1993); high flux soluble phase assays (Hammer et al., J. Exp. Med. 180:2353, 1994), and measurement of class I MHC stabilization or assembly (e.g., Ljunggren et al., Nature 346:476, 1990; Schumacher et al., Cell 62:563, 1990; Townsend et al., Cell 62:285, 1990; Parker et al., J. Immunol. 149:1896, 1992).

[0037] As used herein, “high affinity” with respect to HLA class I molecules is defined as binding with an IC₅₀, or K_{D} value, of 50 nM or less; “intermediate affinity” is binding with an IC₅₀ or K_{D} value of between about 50 and about 500 nM. “High affinity” with respect to binding to HLA class II molecules is defined as binding with an IC₅₀ or K_{D} value of 100 nM or less; “intermediate affinity” is binding with an IC₅₀ or K_{D} value of between about 100 and about 1000 nM.

[0038] The terms “identical” or percent “identity,” in the context of two or more peptide sequences, refer to two or more sequences or subsequences that are the same or have a specified percentage of amino acid residues that are the same, when compared and aligned for maximum correspondence over a comparison window, as measured using a sequence comparison algorithm or by manual alignment and visual inspection.

[0039] An “immunogenic peptide” or “peptide epitope” is a peptide that comprises an allele-specific motif or supermotif such that the peptide will bind an HLA molecule and induce a CTL and/or HTL response. Thus, immunogenic peptides of the invention are capable of binding to an appropriate HLA molecule and thereafter inducing a cytotoxic T cell response, or a helper T cell response, to the antigen from which the immunogenic peptide is derived.

[0040] The phrases “isolated” or “biologically pure” refer to material which is substantially or essentially free from components which normally accompany the material as it is found in its native state. Thus, isolated peptides in accordance with the invention preferably do not contain materials normally associated with the peptides in their in situ environment.

[0041] “Link” or “join” refers to any method known in the art for functionally connecting peptides, including, without limitation, recombinant fusion, covalent bonding, disulfide bonding, ionic bonding, hydrogen bonding, and electrostatic bonding.

[0042] “Major Histocompatibility Complex” or “MHC” is a cluster of genes that plays a role in control of the cellular interactions responsible for physiologic immune responses. In humans, the MHC complex is also known as the HLA complex. For a detailed description of the MHC and HLA complexes, see, Paul, FUNDAMENTAL IMMUNOLOGY, 3^{RD} ED., Raven Press, New York, 1993.

[0043] The term “motif” refers to the pattern of residues in a peptide of defined length, usually a peptide of from about 8 to about 13 amino acids for a class I HLA motif and from about 6 to about 25 amino acids for a class II HLA motif, which is recognized by a particular HLA molecule. Peptide motifs are typically different for each protein encoded by each human HLA allele and differ in the pattern of the primary and secondary anchor residues.

[0044] A “negative binding residue” or “deleterious residue” is an amino acid which, if present at certain positions (typically not primary anchor positions) in a peptide epitope, results in decreased binding affinity of the peptide for the peptide's corresponding HLA molecule.

[0045] The term “peptide” is used interchangeably with “oligopeptide” in the present specification to designate a series of residues, typically L-amino acids, connected one to the other, typically by peptide bonds between the α-amino and carboxyl groups of adjacent amino acids. The preferred CTL-inducing peptides of the invention are 13 residues or less in length and usually consist of between about 8 and about 11 residues, preferably 9 or 10 residues. The preferred HTL-inducing oligopeptides are less than about 50 residues in length and usually consist of between about 6 and about 30 residues, more usually between about 12 and 25, and often between about 15 and 20 residues.

[0046] “Pharmaceutically acceptable” refers to a generally non-toxic, inert, and/or physiologically compatible composition.

[0047] A “pharmaceutical excipient” comprises a material such as an adjuvant, a carrier, pH-adjusting and buffering agents, tonicity adjusting agents, wetting agents, preservative, and the like.

[0048] A “primary anchor residue” is an amino acid at a specific position along a peptide sequence which is understood to provide a contact point between the immunogenic peptide and the HLA molecule. One to three, usually two, primary anchor residues within a peptide of defined length generally defines a “motif” for an immunogenic peptide. These residues are understood to fit in close contact with peptide binding grooves of an HLA molecule, with their side chains buried in specific pockets of the binding grooves themselves. In one embodiment, for example, the primary anchor residues are located at position 2 (from the amino terminal position) and at the carboxyl terminal position of a 9-residue peptide epitope in accordance with the invention. The primary anchor positions for each motif and supermotif are set forth in Table 1. For example, analog peptides can be created by altering the presence or absence of particular residues in these primary anchor positions. Such analogs are used to modulate the binding affinity of a peptide comprising a particular motif or supermotif.

[0049] “Promiscuous recognition” is where a distinct peptide is recognized by the same T cell clone in the context of various HLA molecules. Promiscuous recognition or binding is synonymous with cross-reactive binding.

[0050] A “protective immune response” or “therapeutic immune response” refers to a CTL and/or an HTL response to an antigen derived from an infectious agent or a tumor antigen, which prevents or at least partially arrests disease symptoms or progression. The immune response may also include an antibody response which has been facilitated by the stimulation of helper T cells.

[0051] The term “residue” refers to an amino acid or amino acid mimetic incorporated into an oligopeptide by an amide bond or amide bond mimetic.

[0052] A “secondary anchor residue” is an amino acid at a position other than a primary anchor position in a peptide which may influence peptide binding. A secondary anchor residue occurs at a significantly higher frequency amongst bound peptides than would be expected by random distribution of amino acids at one position. The secondary anchor residues are said to occur at “secondary anchor positions.” A secondary anchor residue can be identified as a residue which is present at a higher frequency among high or intermediate affinity binding peptides, or a residue otherwise associated with high or intermediate affinity binding. For example, analog peptides can be created by altering the presence or absence of particular residues in these secondary anchor positions. Such analogs are used to finely modulate the binding affinity of a peptide comprising a particular motif or supermotif.

[0053] A “subdominant epitope” is an epitope which evokes little or no response upon immunization with whole antigens which comprise the epitope, but for which a response can be obtained by immunization with an isolated peptide, and this response (unlike the case of cryptic epitopes) is detected when whole protein is used to recall the response in vitro or in vivo.

[0054] A “supermotif” is a peptide binding specificity shared by HLA molecules encoded by two or more HLA alleles. Preferably, a supermotif-bearing peptide is recognized with high or intermediate affinity (as defined herein) by two or more HLA molecules.

[0055] “Synthetic peptide” refers to a peptide that is man-made using such methods as chemical synthesis or recombinant DNA technology.

[0056] As used herein, a “vaccine” is a composition that contains one or more peptides of the invention. There are numerous embodiments of vaccines in accordance with the invention, such as by a cocktail of one or more peptides; one or more epitopes of the invention comprised by a polyepitopic peptide; or nucleic acids that encode such peptides or polypeptides, e.g., a minigene that encodes a polyepitopic peptide. The “one or more peptides” can include any whole unit integer from 1-150, e.g., at least 2, 3, 4, 5, 6, 7, 8, 9, 10, 11, 12, 13, 14, 15, 16, 17, 18, 19, 20, 21, 22, 23, 24, 25, 26, 27, 28, 29, 30, 31, 32, 33, 34, 35, 36, 37, 38, 39, 40, 45, 50, 55, 60, 65, 70, 75, 80, 85, 90, 95, 100, 105, 110, 115, 120, 125, 130, 135, 140, 145, or 150 or more peptides of the invention. The peptides or polypeptides can optionally be modified, such as by lipidation, addition of targeting or other sequences. HLA class I-binding peptides of the invention can be admixed with, or linked to, HLA class II-binding peptides, to facilitate activation of both cytotoxic T lymphocytes and helper T lymphocytes. Vaccines can also comprise peptide-pulsed antigen presenting cells, e.g., dendritic cells.

[0057] The nomenclature used to describe peptide compounds follows the conventional practice wherein the amino group is presented to the left (the N-terminus) and the carboxyl group to the right (the C-terminus) of each amino acid residue. When amino acid residue positions are referred to in a peptide epitope they are numbered in an amino to carboxyl direction with position one being the position closest to the amino terminal end of the epitope, or the peptide or protein of which it may be a part. In the formulae representing selected specific embodiments of the present invention, the amino- and carboxyl-terminal groups, although not specifically shown, are in the form they would assume at physiologic pH values, unless otherwise specified. In the amino acid structure formulae, each residue is generally represented by standard three letter or single letter designations. The L-form of an amino acid residue is represented by a capital single letter or a capital first letter of a three-letter symbol, and the D-form for those amino acids having D-forms is represented by a lower case single letter or a lower case three letter symbol. Glycine has no asymmetric carbon atom and is simply referred to as “Gly” or G. The amino acid sequences of peptides set forth herein are generally designated using the standard single letter symbol. (A, Alanine; C, Cysteine; D, Aspartic Acid; E, Glutamic Acid; F, Phenylalanine; G, Glycine; H, Histidine; I, Isoleucine; K, Lysine; L, Leucine; M, Methionine; N, Asparagine; P, Proline; Q, Glutamine; R, Arginine; S, Serine; T, Threonine; V, Valine; W, Tryptophan; and Y, Tyrosine.) In addition to these symbols, “B” in the single letter abbreviations used herein designates α-amino butyric acid.

### IV.B. Stimulation of CTL and HTL Responses

[0058] The mechanism by which T cells recognize antigens has been delineated during the past ten years. Based on our understanding of the immune system we have developed efficacious peptide epitope vaccine compositions that can induce a therapeutic or prophylactic immune response to a TAA in a broad population. For an understanding of the value and efficacy of the claimed compositions, a brief review of immunology-related technology is provided. The review is intended to disclose the presently understood state of the art as of the filing date of the present application. Information is included in this section which was generated subsequent to the priority date of this application. Accordingly, information in this section is not intended, in any way, to delineate the priority date for the invention.

[0059] A complex of an HLA molecule and a peptidic antigen acts as the ligand recognized by HLA-restricted T cells (Buus, S. et al., Cell 47:1071, 1986; Babbitt, B. P. et al., Nature 317:359, 1985; Townsend, A. and Bodmer, H., Annu. Rev. Immunol. 7:601, 1989; Germain, R. N., Annu. Rev. Immunol. 11:403, 1993). Through the study of single amino acid substituted antigen analogs and the sequencing of endogenously bound, naturally processed peptides, critical residues that correspond to motifs required for specific binding to HLA antigen molecules have been identified and are described herein and are set forth in Tables I, II, and III (see also, e.g., Southwood, et al., J. Immunol. 160:3363, 1998; Rammensee, et al., Immunogenetics 41:178, 1995; Rammensee et al., SYFPEITHI, access via web at: http://134.2.96.221/scripts.hlaserver.dll/home.htm; Sette, A. and Sidney, J. Curr. Opin. Immunol. 10:478, 1998; Engelhard, V. H., Curr. Opin. Immunol. 6:13, 1994; Sette, A. and Grey, H. M., Curr. Opin. Immunol. 4:79, 1992; Sinigaglia, F. and Hammer, J. Curr. Biol. 6:52, 1994; Ruppert et al., Cell 74:929-937, 1993; Kondo et al., J. Immunol. 155:4307-4312, 1995; Sidney et al., J. Immunol. 157:3480-3490, 1996; Sidney et al., Human Immunol. 45:79-93, 1996; Sette, A. and Sidney, J. Immmunogenetics 1999 November;50(3-4):201-12, Review).

[0060] Furthermore, x-ray crystallographic analysis of HLA-peptide complexes has revealed pockets within the peptide binding cleft of HLA molecules which accommodate, in an allele-specific mode, residues borne by peptide ligands; these residues in turn determine the HLA binding capacity of the peptides in which they are present. (See, e.g., Madden, D. R. Annu. Rev. Immunol. 13:587, 1995; Smith, et al., Immunity 4:203, 1996; Fremont et al., Immunity 8:305, 1998; Stern et al., Structure 2:245, 1994; Jones, E. Y. Curr. Opin. Immunol. 9:75, 1997; Brown, J. H. et al., Nature 364:33, 1993; Guo, H. C. et al., Proc. Natl. Acad. Sci. USA 90:8053, 1993; Guo, H. C. et al., Nature 360:364, 1992; Silver, M. L. et al., Nature 360:367, 1992; Matsumura, M. et al., Science 257:927, 1992; Madden et al., Cell 70:1035, 1992; Fremont, D. H. et al., Science 257:919, 1992; Saper, M. A., Bjorkman, P. J. and Wiley, D. C., J. Mol. Biol. 219:277, 1991.)

[0061] Accordingly, the definition of class I and class II allele-specific HLA binding motifs, or class I or class II supermotifs allows identification of regions within a protein that have the potential of binding particular HLA molecules.

[0062] The present inventors have found that the correlation of binding affinity with immunogenicity, which is disclosed herein, is an important factor to be considered when evaluating candidate peptides. Thus, by a combination of motif searches and HLA-peptide binding assays, candidates for epitope-based vaccines have been identified. After determining their binding affinity, additional confirmatory work can be performed to select, amongst these vaccine candidates, epitopes with preferred characteristics in terms of population coverage, antigenicity, and immunogenicity.

[0063] Various strategies can be utilized to evaluate immunogenicity, including:

[0064] 1) Evaluation of primary T cell cultures from normal individuals (see, eg., Wentworth, P. A. et al., Mol. Immunol. 32:603, 1995; Celis, E. et al., Proc. Natl. Acad. Sci. USA 91:2105, 1994; Tsai, V. et al., J. Immunol. 158:1796, 1997; Kawashima, I. et al, Human Immunol. 59:1, 1998); This procedure involves the stimulation of peripheral blood lymphocytes (PBL) from normal subjects with a test peptide in the presence of antigen presenting cells in vitro over a period of several weeks. T cells specific for the peptide become activated during this time and are detected using, e.g., a ⁵¹Cr-release assay involving peptide sensitized target cells.

[0065] 2) Immunization of HLA transgenic mice (see, e.g., Wentworth, P. A. et a!, J. Immunol. 26:97, 1996; Wentworth, P. A. et al., Int. Immunol. 8:651, 1996; Alexander, J. et al., J. Immunol. 159:4753, 1997); In this method, peptides in incomplete Freund's adjuvant are administered subcutaneously to HLA transgenic mice. Several weeks following immunization, splenocytes are removed and cultured in vitro in the presence of test peptide for approximately one week. Peptide-specific T cells are detected using, e.g., a ⁵¹Cr-release assay involving peptide sensitized target cells and target cells expressing endogenously generated antigen.

[0066] 3) Demonstration of recall T cell responses from patients who have been effectively vaccinated or who have a tumor; (see, e.g., Rehermann, B. et al., J. Exp. Med. 181:1047, 1995; Doolan, D. L. et al., Immunity 7:97, 1997; Bertoni, R. et al., J. Clin. Invest. 100:503, 1997; Threlkeld, S. C. et al., J. Immunol. 159:1648, 1997; Diepolder, H. M. et al., J. Virol. 71:6011, 1997; Tsang et al., J. Natl. Cancer Inst. 87:982-990, 1995; Disis et al., J. Immunol. 156:3151-3158, 1996). In applying this strategy, recall responses are detected by culturing PBL from patients with cancer who have generated an immune response “naturally”, or from patients who were vaccinated with tumor antigen vaccines. PBL from subjects are cultured in vitro for 1-2 weeks in the presence of test peptide plus antigen presenting cells (APC) to allow activation of “memory” T cells, as compared to “naive” T cells. At the end of the culture period, T cell activity is detected using assays for T cell activity including ⁵¹Cr release involving peptide-sensitized targets, T cell proliferation, or lymphokine release.

[0067] The following describes the peptide epitopes and corresponding nucleic acids of the invention.

### IV.C. Binding Affinity of Peptide Epitopes for HLA Molecules

[0068] As indicated herein, the large degree of HLA polymorphism is an important factor to be taken into account with the epitope-based approach to vaccine development. To address this factor, epitope selection encompassing identification of peptides capable of binding at high or intermediate affinity to multiple HLA molecules is preferably utilized, most preferably these epitopes bind at high or intermediate affinity to two or more allele-specific HLA molecules.

[0069] CTL-inducing peptides of interest for vaccine compositions preferably include those that have an IC₅₀ or binding affinity value for class I HLA molecules of 500 nM or better (i.e., the value is ≦500 nM). HTL-inducing peptides preferably include those that have an IC₅₀ or binding affinity value for class II HLA molecules of 1000 nM or better, (i.e., the value is ≦1,000 nM). For example, peptide binding is assessed by testing the capacity of a candidate peptide to bind to a purified HLA molecule in vitro. Peptides exhibiting high or intermediate affinity are then considered for further analysis. Selected peptides are tested on other members of the supertype family. In preferred embodiments, peptides that exhibit cross-reactive binding are then used in cellular screening analyses or vaccines.

[0070] As disclosed herein, higher HLA binding affinity is correlated with greater immunogenicity. Greater immunogenicity can be manifested in several different ways. Immunogenicity corresponds to whether an immune response is elicited at all, and to the vigor of any particular response, as well as to the extent of a population in which a response is elicited. For example, a peptide might elicit an immune response in a diverse array of the population, yet in no instance produce a vigorous response. Moreover, higher binding affinity peptides lead to more vigorous immunogenic responses. As a result, less peptide is required to elicit a similar biological effect if a high or intermediate affinity binding peptide is used. Thus, in preferred embodiments of the invention, high or intermediate affinity binding epitopes are particularly useful.

[0071] The relationship between binding affinity for HLA class I molecules and immunogenicity of discrete peptide epitopes on bound antigens has been determined for the first time in the art by the present inventors. The correlation between binding affinity and immunogenicity was analyzed in two different experimental approaches (see, e.g., Sette, et al., J. Immunol. 153:5586-5592, 1994). In the first approach, the immunogenicity of potential epitopes ranging in HLA binding affinity over a 10,000-fold range was analyzed in HLA-A*0201 transgenic mice. In the second approach, the antigenicity of approximately 100 different hepatitis B virus (HBV)-derived potential epitopes, all carrying A*0201 binding motifs, was assessed by using PBL from acute hepatitis patients. Pursuant to these approaches, it was determined that an affinity threshold value of approximately 500 nM (preferably 50 nM or less) determines the capacity of a peptide epitope to elicit a CTL response. These data are true for class I binding affinity measurements for naturally processed peptides and for synthesized T cell epitopes. These data also indicate the important role of determinant selection in the shaping of T cell responses (see, e.g., Schaeffer et al., Proc. Natl. Acad Sci. USA 86:4649-4653, 1989).

[0072] An affinity threshold associated with immunogenicity in the context of HLA class II DR molecules has also been delineated (see, e.g., Southwood et al. J. Immunology 160:3363-3373,1998, and co-pending U.S. Ser. No. 09/009,953 filed Jan. 21, 1998). In order to define a biologically significant threshold of DR binding affinity, a database of the binding affinities of 32 DR-restricted epitopes for their restricting element (i.e., the HLA molecule that binds the motif) was compiled. In approximately half of the cases (15 of 32 epitopes), DR restriction was associated with high binding affinities, i.e. binding affinity values of 100 nM or less. In the other half of the cases (16 of 32), DR restriction was associated with intermediate affinity (binding affinity values in the 100-1000 nM range). In only one of 32 cases was DR restriction associated with an IC₅₀ of 1000 nM or greater. Thus, 1000 nM can be defined as an affinity threshold associated with immunogenicity in the context of DR molecules.

[0073] In the case of tumor-associated antigens, many CTL peptide epitopes that have been shown to induce CTL that lyse peptide-pulsed target cells and tumor cell targets endogenously expressing the epitope exhibit binding affinity or IC₅₀ values of 200 nM or less. In a study that evaluated the association of binding affinity and immunogenicity of such TAA epitopes, 100% (10/10) of the high binders, i.e., peptide epitopes binding at an affinity of 50 nM or less, were immunogenic and 80% (8/10) of them elicited CTLs that specifically recognized tumor cells. In the 51 to 200 nM range, very similar figures were obtained. CTL inductions positive for peptide and tumor cells were noted for 86% (6/7) and 71% (5/7) of the peptides, respectively. In the 201-500 nM range, most peptides (4/5 wildtype) were positive for induction of CTL recognizing wildtype peptide, but tumor recognition was not detected.

[0074] The binding affinity of peptides for HLA molecules can be determined as described in Example 1, below.

### IV.D. Peptide Epitope Binding Motifs and Supermotifs

[0075] Through the study of single amino acid substituted antigen analogs and the sequencing of endogenously bound, naturally processed peptides, critical residues required for allele-specific binding to HLA molecules have been identified. The presence of these residues correlates with binding affinity for HLA molecules. The identification of motifs and/or supermotifs that correlate with high and intermediate affinity binding is an important issue with respect to the identification of immunogenic peptide epitopes for the inclusion in a vaccine. Kast et al. (J. Immunol. 152:3904-3912, 1994) have shown that motif-bearing peptides account for 90% of the epitopes that bind to allele-specific HLA class I molecules. In this study all possible peptides of 9 amino acids in length and overlapping by eight amino acids (240 peptides), which cover the entire sequence of the E6 and E7 proteins of human papillomavirus type 16, were evaluated for binding to five allele-specific HLA molecules that are expressed at high frequency among different ethnic groups. This unbiased set of peptides allowed an evaluation of the predictive value of HLA class I motifs. From the set of 240 peptides, 22 peptides were identified that bound to an allele-specific HLA molecule with high or intermediate affinity. Of these 22 peptides, 20 (i.e. 91%) were motif-bearing. Thus, this study demonstrates the value of motifs for the identification of peptide epitopes for inclusion in a vaccine: application of motif-based identification techniques will identify about 90% of the potential epitopes in a target antigen protein sequence.

[0076] Such peptide epitopes are identified in the Tables described below.

[0077] Peptides of the present invention also comprise epitopes that bind to MHC class II DR molecules. A greater degree of heterogeneity in both size and binding frame position of the motif, relative to the N and C termini of the peptide, exists for class II peptide ligands. This increased heterogeneity of HLA class II peptide ligands is due to the structure of the binding groove of the HLA class II molecule which, unlike its class I counterpart, is open at both ends. Crystallographic analysis of HLA class II DRB*0101-peptide complexes showed that the major energy of binding is contributed by peptide residues complexed with complementary pockets on the DRB*0101 molecules. An important anchor residue engages the deepest hydrophobic pocket (see, e.g., Madden, D. R. Ann. Rev. Immunol. 13:587, 1995) and is referred to as position 1 (P1). P1 may represent the N-terminal residue of a class II binding peptide epitope, but more typically is flanked towards the N-terminus by one or more residues. Other studies have also pointed to an important role for the peptide residue in the 6^{th} position towards the C-terminus, relative to P1, for binding to various DR molecules.

[0078] In the past few years evidence has accumulated to demonstrate that a large fraction of HLA class I and class II molecules can be classified into a relatively few supertypes, each characterized by largely overlapping peptide binding repertoires, and consensus structures of the main peptide binding pockets. Thus, peptides of the present invention are identified by any one of several HLA-specific amino acid motifs (see, e.g., Tables I-III), or if the presence of the motif corresponds to the ability to bind several allele-specific HLA molecules, a supermotif. The HLA molecules that bind to peptides that possess a particular amino acid supermotif are collectively referred to as an HLA “supertype.”

[0079] The peptide motifs and supermotifs described below, and summarized in Tables I-III, provide guidance for the identification and use of peptide epitopes in accordance with the invention.

[0080] Examples of peptide epitopes bearing a respective supermotif or motif are included in Tables as designated in the description of each motif or supermotif below. The Tables include a binding affinity ratio listing for some of the peptide epitopes. The ratio may be converted to IC₅₀ by using the following formula: IC₅₀ of the standard peptide/ratio=IC₅₀ of the test peptide (i.e., the peptide epitope). The IC₅₀ values of standard peptides used to determine binding affinities for Class I peptides are shown in Table IV. The IC₅₀ values of standard peptides used to determine binding affinites for Class II peptides are shown in Table V. The peptides used as standards for the binding assays described herein are examples of standards; alternative standard peptides can also be used when performing binding studies.

[0081] To obtain the peptide epitope sequences listed in each of Tables VII-XX, the amino acid sequence of HER2/neu was evaluated for the presence of the designated supermotif or motif, i.e., the amino acid sequence was searched for the presence of the primary anchor residues as set out in Table I (for Class I motifs) or Table III (for Class II motifs) for each respective motif or supermotif.

[0082] In the Tables, motif- and/or supermotif-bearing epitopes in the HER2/neu sequence are indicated by position number and length of the epitope with reference to the HER2/neu sequence and numbering provided below. The “pos” (position) column designates the amino acid position in the HER2/neu protein sequence that corresponds to the first amino acid residue of the epitope. The “number of amino acids” indicates the number of residues in the epitope sequence and hence the length of the epitope. For example, the first peptide epitope listed in Table VII is a sequence of 8 residues in length starting at position 66. Accordingly, the amino acid sequence of the epitope is PTNASLSF.

[0083] Binding data presented in Tables VII-XX is expressed as a relative binding ratio, supra.

| HER2/neu amino acid sequence | | |
|---|---|---|
| 1 | MELAALCRWG LLLALLPPGA ASTQVCTGTD MKLRLPASPE THLDMLRHLY QGCQVVQGNL | 60 |
| | ELTYLPTNAS LSFLQDIQEV QGYVLIAHNQ VRQVPLQRLR IVRGTQLFED NYALAVLDNG | 120 |
| | DPLNNTTPVT GASPGGLREL QLRSLTEILK GGVLIQRNPQ LCYQDTILWK DIFHKNWQLA | 180 |
| | LTLIDTNRSR ACHPCSPMCK GSRCWGESSE DCQSLTRTVC AGGCARCKGP LPTDCCHEQC | 240 |
| | AAGCTGPKHS DCLACLHFNH SGICELHCPA LVTYNTDTFE SMPNPEGRYT FGASCVTACP | 300 |
| | YNYLSTDVGS CTLVCPLHNQ EVTAEDGTQR CEKCSKPCAR VCYGLGMEHL REVRAVTSAN | 360 |
| | IQEFAGCKKI FGSLAFLPES FDGDPASNTA PLQPEQLQVF ETLEEITGYL YISAWPDSLP | 420 |
| | DISVFQNLQV IRGRILHNGA YSLTLQGLGI SWLGLRSLRE LGSGLALIHH NTHLCFVHTV | 480 |
| | PWDQLFRNPH QALLHTANRP EDECVGEGLA CHQLCARGHC WGPGPTQCVN CSQFLRGQEC | 540 |
| | VEECRVLQGL PREYVNARHC LPCHPECQPQ NGSVTCFGPE ADQCVACAHY KDPPFCVARC | 600 |
| | PSGVKPDLSY MPIWKFPDEE GACQPCPINC THSCVDLDDK GCPAEQRASP LTSIISAVVG | 660 |
| | ILLVVVLGVV FGTLIKRRQQ KIRKYTMRRL LQETELVEPL TPSGANPNQA QMRILKETEL | 720 |
| | RKVKVLGSGA FGTVYKGIWI PDGENVKIPV AIKVLRENTS PKANKEILDE AYVMAGVGSP | 780 |
| | YVSRLLGICL TSTVQLVTQL MPYGCLLDHV RENRGRLGSQ DLLNWCMQIA KGMSYLEDVR | 840 |
| | LVHRDLAARN VLVKSPNHVK ITDFGLARLL DIDETEYHAD GGKVPIKWMA LESILRRRFT | 900 |
| | HQSDVWSYGV TVWELMTFGA KPYDGIPARE IPDLLEKGER LPQPPICTID VYMIMVKCWM | 960 |
| | IDSECRPRFR ELVSEFSRMA RDPQRFVVIQ NEDLGPASPL DSTFYRSLLE DDDMGDLVDA | 1020 |
| | EEYLVPQQGF FCPDPAPGAG GMVHHRHRSS STRSGGGDLT LGLEPSEEEA PRSPLAPSEG | 1080 |
| | AGSDVFDGDL GMGAAKGLQS LPTRDPSPLQ RYSEDPTVPL PSETDGYVAP LTCSPQPEYV | 1140 |
| | NQPDVRPQPP SPREGPLPAA RPAGATLERP KTLSPGKNGV VKDVFAFGGA VENPEYLTPQ | 1200 |
| | GGAAPQPHPP PAFSPAFDNL YYWDQDPPER GAPPSTFKGT PTAENPEYLG LDVPV 1255 | |

[0084] HLA Class I Motifs Indicative of CTL Inducing Peptide Epitopes:

[0085] The primary anchor residues of the HLA class I peptide epitope supermotifs and motifs delineated below are summarized in Table I. The HLA class I motifs set out in Table I(a) are those most particularly relevant to the invention claimed here. Primary and secondary anchor positions are summarized in Table II. Allele-specific HLA molecules that comprise HLA class I supertype families are listed in Table VI. In some cases, peptide epitopes may be listed in both a motif and a supermotif Table. The relationship of a particular motif and respective supermotif is indicated in the description of the individual motifs.

[0086] IV.D.1. HLA-A1 Supermotif

[0087] The HLA-A1 supermotif is characterized by the presence in peptide ligands of a small (T or S) or hydrophobic (L, I, V, or M) primary anchor residue in position 2, and an aromatic (Y, F, or W) primary anchor residue at the C-terminal position of the epitope. The corresponding family of HLA molecules that bind to the A1 supermotif (i.e., the HLA-A1 supertype) is comprised of at least: A*0101, A*2601, A*2602, A*2501, and A*3201 (see, e.g., DiBrino, M. et al., J. Immunol. 151:5930, 1993; DiBrino, M. et al., J. Immunol. 152:620, 1994; Kondo, A. et al., Immunogenetics 45:249, 1997). Other allele-specific HLA molecules predicted to be members of the A1 superfamily are shown in Table VI. Peptides binding to each of the individual HLA proteins can be modulated by substitutions at primary and/or secondary anchor positions, preferably choosing respective residues specified for the supermotif.

[0088] Representative peptide epitopes that comprise the A1 supermotif are set forth in Table VII.

[0089] IV.D.2. HLA-A2 Supermotif

[0090] Primary anchor specificities for allele-specific HLA-A2.1 molecules (see, e.g., Falk et al., Nature 351:290-296, 1991; Hunt et al., Science 255:1261-1263, 1992; Parker et al., J. Immunol. 149:3580-3587, 1992; Ruppert et al., Cell 74:929-937, 1993) and cross-reactive binding among HLA-A2 and -A28 molecules have been described. (See, e.g., Fruci et al., Human Immunol. 38:187-192, 1993; Tanigaki et al., Human Immunol. 39:155-162, 1994; Del Guercio et al., J. Immunol. 154:685-693, 1995; Kast et al., J. Immunol. 152:3904-3912, 1994 for reviews of relevant data.) These primary anchor residues define the HLA-A2 supermotif; which presence in peptide ligands corresponds to the ability to bind several different HLA-A2 and -A28 molecules. The HLA-A2 supermotif comprises peptide ligands with L, I, V, M, A, T, or Q as a primary anchor residue at position 2 and L, I, V, M, A, or T as a primary anchor residue at the C-terminal position of the epitope.

[0091] The corresponding family of HLA molecules (i.e., the HLA-A2 supertype that binds these peptides) is comprised of at least: A*0201, A*0202, A*0203, A*0204, A*0205, A*0206, A*0207, A*0209, A*0214, A*6802, and A*6901. Other allele-specific HLA molecules predicted to be members of the A2 superfamily are shown in Table VI. As explained in detail below, binding to each of the individual allele-specific HLA molecules can be modulated by substitutions at the primary anchor and/or secondary anchor positions, preferably choosing respective residues specified for the supermotif.

[0092] Representative peptide epitopes that comprise an A2 supermotif are set forth in Table VIII. The motifs comprising the primary anchor residues V, A, T, or Q at position 2 and L, I, V, A, or T at the C-terminal position are those most particularly relevant to the invention claimed herein.

[0093] IV.D.3. HLA-A3 Supermotif

[0094] The HLA-A3 supermotif is characterized by the presence in peptide ligands of A, L, I, V, M, S, or, T as a primary anchor at position 2, and a positively charged residue, R or K, at the C-terminal position of the epitope, e.g., in position 9 of 9-mers (see, e.g., Sidney et al., Hum. Immunol. 45:79, 1996). Exemplary members of the corresponding family of HLA molecules (the HLA-A3 supertype) that bind the A3 supermotif include at least: A*0301, A*1101, A*3101, A*3301, and A*6801. Other allele-specific HLA molecules predicted to be members of the A3 supertype are shown in Table VI. As explained in detail below, peptide binding to each of the individual allele-specific HLA proteins can be modulated by substitutions of amino acids at the primary and/or secondary anchor positions of the peptide, preferably choosing respective residues specified for the supermotif.

[0095] Representative peptide epitopes that comprise the A3 supermotif are set forth in Table IX.

[0096] IV.D.4. HLA-A24 Supermotif

[0097] The HLA-A24 supermotif is characterized by the presence in peptide ligands of an aromatic (F, W, or Y) or hydrophobic aliphatic (L, I, V, M, or T) residue as a primary anchor in position 2, and Y, F, W, L, I, or M as primary anchor at the C-terminal position of the epitope (see, e.g., Sette and Sidney, Immunogenetics 1999 November; 50(3-4):201-12, Review). The corresponding family of HLA molecules that bind to the A24 supermotif (i.e., the A24 supertype) includes at least: A*2402, A*3001, and A*2301. Other allele-specific HLA molecules predicted to be members of the A24 supertype are shown in Table VI. Peptide binding to each of the allele-specific HLA molecules can be modulated by substitutions at primary and/or secondary anchor positions, preferably choosing respective residues specified for the supermotif.

[0098] Representative peptide epitopes that comprise the A24 supermotif are set forth in Table X.

[0099] IV.D.5. HLA-B7 Supermotif

[0100] The HLA-B7 supermotif is characterized by peptides bearing proline in position 2 as a primary anchor, and a hydrophobic or aliphatic amino acid (L, I, V, M, A, F, W, or Y) as the primary anchor at the C-terminal position of the epitope. The corresponding family of HLA molecules that bind the B7 supermotif (i.e., the HLA-B7 supertype) is comprised of at least twenty six HLA-B proteins comprising at least: B*0702, B*0703, B*0704, B*0705, B*1508, B*3501, B*3502, B*3503, B*3504, B*3505, B*3506, B*3507, B*3508, B*5101, B*5102, B*5103, B*5104, B*5105, B*5301, B*5401, B*5501, B*5502, B*5601, B*5602, B*6701, and B*7801 (see, e.g., Sidney, et al., J. Immunol. 154:247, 1995; Barber, et al., Curr. Biol. 5:179, 1995; Hill, et al., Nature 360:434, 1992; Rammensee, et al., Immunogenetics 41:178, 1995 for reviews of relevant data). Other allele-specific HLA molecules predicted to be members of the B7 supertype are shown in Table VI. As explained in detail below, peptide binding to each of the individual allele-specific HLA proteins can be modulated by substitutions at the primary and/or secondary anchor positions of the peptide, preferably choosing respective residues specified for the supermotif.

[0101] Representative peptide epitopes that comprise the B7 supermotif are set forth in Table XI.

[0102] IV.D.6. HLA-B27 Supermotif

[0103] The HLA-B27 supermotif is characterized by the presence in peptide ligands of a positively charged (R, H, or K) residue as a primary anchor at position 2, and a hydrophobic (F, Y, L, W, M, I, A, or V) residue as a primary anchor at the C-terminal position of the epitope (see, e.g., Sidney and Sette, Immunogenetics 1999 November; 50(3-4):201-12, Review). Exemplary members of the corresponding family of HLA molecules that bind to the B27 supermotif (i.e., the B27 supertype) include at least B*1401, B*1402, B*1509, B*2702, B*2703, B*2704, B*2705, B*2706, B*3801, B*3901, B*3902, and B*7301. Other allele-specific HLA molecules predicted to be members of the B27 supertype are shown in Table VI. Peptide binding to each of the allele-specific HLA molecules can be modulated by substitutions at primary and/or secondary anchor positions, preferably choosing respective residues specified for the supermotif.

[0104] Representative peptide epitopes that comprise the B27 supermotif are set forth in Table XII.

[0105] IV.D.7. HLA-B44 Supermotif

[0106] The HLA-B44 supermotif is characterized by the presence in peptide ligands of negatively charged (D or E) residues as a primary anchor in position 2, and hydrophobic residues (F, W, Y, L, I, M, V, or A) as a primary anchor at the C-terminal position of the epitope (see, e.g., Sidney et al., Immunol. Today 17:261, 1996). Exemplary members of the corresponding family of HLA molecules that bind to the B44 supermotif (i.e., the B44 supertype) include at least: B*1801, B*1802, B*3701, B*4001, B*4002, B*4006, B*4402, B*4403, and B*4404. Peptide binding to each of the allele-specific HLA molecules can be modulated by substitutions at primary and/or secondary anchor positions; preferably choosing respective residues specified for the supermotif.

[0107] IV.D.8. HLA-B58 Supermotif

[0108] The HLA-B58 supermotif is characterized by the presence in peptide ligands of a small aliphatic residue (A, S, or T) as a primary anchor residue at position 2, and an aromatic or hydrophobic residue (F, W, Y, L, l, V, M, or A) as a primary anchor residue at the C-terminal position of the epitope (see, e.g., Sidney and Sette, Immunogenetics 1999 November; 50(3-4):201-12, Review). Exemplary members of the corresponding family of HLA molecules that bind to the B58 supermotif (i e., the B58 supertype) include at least: B*1516, B*1517, B*5701, B*5702, and B*5801. Other allele-specific HLA molecules predicted to be members of the B58 supertype are shown in Table VI. Peptide binding to each of the allele-specific HLA molecules can be modulated by substitutions at primary and/or secondary anchor positions, preferably choosing respective residues specified for the supermotif.

[0109] Representative peptide epitopes that comprise the B58 supermotif are set forth in Table XIII.

[0110] IV.D.9. HLA-B62 Supermotif

[0111] The HLA-B62 supermotif is characterized by the presence in peptide ligands of the polar aliphatic residue Q or a hydrophobic aliphatic residue (L, V, M, I, or P) as a primary anchor in position 2, and a hydrophobic residue (F, W, Y, M, I, V, L, or A) as a primary anchor at the C-terminal position of the epitope (see, e.g., Sidney and Sette, Immunogenetics 1999 November; 50(3-4):201-12, Review). Exemplary members of the corresponding family of HLA molecules that bind to the B62 supermotif (i.e., the B62 supertype) include at least: B*1501, B*1502, B*1513, and B5201. Other allele-specific HLA molecules predicted to be members of the B62 supertype are shown in Table VI. Peptide binding to each of the allele-specific HLA molecules can be modulated by substitutions at primary and/or secondary anchor positions, preferably choosing respective residues specified for the supermotif.

[0112] Representative peptide epitopes that comprise the B62 supermotif are set forth in Table XIV.

[0113] IV.D.10. HLA-A1 Motif

[0114] The HLA-A1 motif is characterized by the presence in peptide ligands of T, S, or M as a primary anchor residue at position 2 and the presence of Y as a primary anchor residue at the C-terminal position of the epitope. An alternative allele-specific A1 motif is characterized by a primary anchor residue at position 3 rather than position 2. This motif is characterized by the presence of D, E, A, or S as a primary anchor residue in position 3, and a Y as a primary anchor residue at the C-terminal position of the epitope (see, e.g., DiBrino et al., J. Immunol., 152:620, 1994; Kondo et al., Immunogenetics 45:249, 1997; and Kubo et al., J. Immunol. 152:3913, 1994 for reviews of relevant data). Peptide binding to HLA-A1 can be modulated by substitutions at primary and/or secondary anchor positions, preferably choosing respective residues specified for the motif.

[0115] Representative peptide epitopes that comprise either A1 motif are set forth in Table XV. Those epitopes comprising T, S, or M at position 2 and Y at the C-terminal position are also included in the listing of HLA-A1 supermotif-bearing peptide epitopes listed in Table VII, as these residues are a subset of the A1 supermotif primary anchors.

[0116] IV.D.11. HLA-A*0201 Motif

[0117] An HLA-A2*0201 motif was determined to be characterized by the presence in peptide ligands of L or M as a primary anchor residue in position 2, and L or V as a primary anchor residue at the C-terminal position of a 9-residue peptide (see, e.g., Falk et al., Nature 351:290-296, 1991) and was further found to comprise an I at position 2 and I or A at the C-terminal position of a nine amino acid peptide (see, e.g., Hunt et al., Science 255:1261-1263, Mar. 6, 1992; Parker et al., J. Immunol 149:3580-3587, 1992). The A*0201 allele-specific motif has also been defined by the present inventors to additionally comprise V, A, T, or Q as a primary anchor residue at position 2, and M or T as a primary anchor residue at the C-terminal position of the epitope (see, e.g., Kast et al., J. Immunol. 152:3904-3912, 1994). Thus, the HLA-A*0201 motif comprises peptide ligands with L, I, V, M, A, T, or Q as primary anchor residues at position 2 and L, I, V, M, A, or T as a primary anchor residue at the C-terminal position of the epitope. The preferred and tolerated residues that characterize the primary anchor positions of the HLA-A*0201 motif are identical to the residues describing the A2 supermotif. (For reviews of relevant data, see, e.g., del Guercio et al., J. Immunol. 154:685-693, 1995; Ruppert et al., Cell 74:929-937, 1993; Sidney et al., Immunol. Today 17:261-266, 1996; Sette and Sidney, Curr. Opin. in Immunol. 10:478482, 1998). Secondary anchor residues that characterize the A*0201 motif have additionally been defined (see, e.g., Ruppert et al., Cell 74:929-937, 1993). These are shown in Table II. Peptide binding to HLA-A*0201 molecules can be modulated by substitutions at primary and/or secondary anchor positions, preferably choosing respective residues specified for the motif.

[0118] Representative peptide epitopes that comprise an A*0201 motif are set forth in Table VIII. The A*0201 motifs comprising the primary anchor residues V, A, T, or Q at position 2 and L, I, V, A, or T at the C-terminal position are those most particularly relevant to the invention claimed herein.

[0119] IV.D.12. HLA-A3 Motif

[0120] The HLA-A3 motif is characterized by the presence in peptide ligands of L, M, V, I, S, A, T, F, C, G, or D as a primary anchor residue at position 2, and the presence of K, sY, R, H, F, or A as a primary anchor residue at the C-terminal position of the epitope (see, e.g., DiBrino et al., Proc. Natl. Acad. Sci USA 90:1508, 1993; and Kubo et al., J. Immunol. 152:3913-3924, 1994). Peptide binding to HLA-A3 can be modulated by substitutions at primary and/or secondary anchor positions, preferably choosing respective residues specified for the motif.

[0121] Representative peptide epitopes that comprise the A3 motif are set forth in Table XVI. Those peptide epitopes that also comprise the A3 supermotif are also listed in Table IX. The A3 supermotif primary anchor residues comprise a subset of the A3- and A11-allele specific motif primary anchor residues.

[0122] IV.D.13. HLA-A11 Motif

[0123] The HLA-A 11 motif is characterized by the presence in peptide ligands of V, T, M, L, I, S, A, G, N, C, D, or F as a primary anchor residue in position 2, and K, R, Y, or H as a primary anchor residue at the C-terminal position of the epitope (see, e.g., Zhang et al., Proc. Natl. Acad Sci USA 90:2217-2221, 1993; and Kubo et al., J. Immunol. 152:3913-3924, 1994). Peptide binding to HLA-A11 can be modulated by substitutions at primary and/or secondary anchor positions, preferably choosing respective residues specified for the motif.

[0124] Representative peptide epitopes that comprise the A11 motif are set forth in Table XVII; peptide epitopes comprising the A3 allele-specific motif are also present in this Table because of the extensive overlap between the A3 and A11 motif primary anchor specificities. Further, those peptide epitopes that comprise the A3 supermotif are also listed in Table IX.

[0125] IV.D.14. HLA-A24 Motif

[0126] The HLA-A24 motif is characterized by the presence in peptide ligands of Y, F, W, or M as a primary anchor residue in position 2, and F, L, I, or W as a primary anchor residue at the C-terminal position of the epitope (see, e.g., Kondo et al., J. Immunol. 155:43074312, 1995; and Kubo et al., J. Immunol. 152:3913-3924, 1994). Peptide binding to HLA-A24 molecules can be modulated by substitutions at primary and/or secondary anchor positions; preferably choosing respective residues specified for the motif.

[0127] Representative peptide epitopes that comprise the A24 motif are set forth in Table XVIII. These epitopes are also listed in Table X, which sets forth HLA-A24-supermotif-bearing peptide epitopes, as the primary anchor residues characterizing the A24 allele-specific motif comprise a subset of the A24 supermotif primary anchor residues.

[0128] Motifs Indicative of Class II HTL Inducing Peptide Epitopes

[0129] The primary and secondary anchor residues of the HLA class II peptide epitope supermotifs and motifs delineated below are summarized in Table III.

[0130] IV.D.15. HLA DR-1-4-7 Supermotif

[0131] Motifs have also been identified for peptides that bind to three common HLA class II allele-specific HLA molecules: HLA DRB1*0401, DRB1*0101, and DRB1*0701 (see, e.g., the review by Southwood et al. J. Immunology 160:3363-3373,1998). Collectively, the common residues from these motifs delineate the HLA DR-1-4-7 supermotif. Peptides that bind to these DR molecules carry a supermotif characterized by a large aromatic or hydrophobic residue (Y, F, W, L, I, V, or M) as a primary anchor residue in position 1, and a small, non-charged residue (S, T, C, A, P, V, I, L, or M) as a primary anchor residue in position 6 of a 9-mer core region. Allele-specific secondary effects and secondary anchors for each of these HLA types have also been identified (Southwood et al., supra). These are set forth in Table III. Peptide binding to HLA-DRB1*0401, DRB1*0101, and/or DRB1*0701 can be modulated by substitutions at primary and/or secondary anchor positions, preferably choosing respective residues specified for the supermotif.

[0132] Potential epitope 9-mer core regions comprising the DR-1-4-7 supermotif, wherein position 1 of the supermotif is at position 1 of the nine-residue core, are set forth in Table XIX. Respective exemplary peptide epitopes of 15 amino acid residues in length, each of which comprise a nine residue core, are also shown, along with cross-reactive binding data for the exemplary 15-residue peptides.

[0133] IV.D.16. HLA DR3 Motifs

[0134] Two alternative motifs (i.e., submotifs) characterize peptide epitopes that bind to HLA-DR3 molecules (see, e.g., Geluk et al., J. Immunol. 152:5742, 1994). In the first motif (submotif DR3a) a large, hydrophobic residue (L, I, V, M, F, or Y) is present in anchor position 1 of a 9-mer core, and D is present as an anchor at position 4, towards the carboxyl terminus of the epitope. As in other class II motifs, core position 1 may or may not occupy the peptide N-terminal position.

[0135] The alternative DR3 submotif provides for lack of the large, hydrophobic residue at anchor position 1, and/or lack of the negatively charged or amide-like anchor residue at position 4, by the presence of a positive charge at position 6 towards the carboxyl terminus of the epitope. Thus, for the alternative allele-specific DR3 motif (submotif DR3b): L, I, V, M, F, Y, A, or Y is present at anchor position 1; D, N, Q, E, S, or T is present at anchor position 4; and K, R, or H is present at anchor position 6. Peptide binding to HLA-DR3 can be modulated by substitutions at primary and/or secondary anchor positions, preferably choosing respective residues specified for the motif.

[0136] Potential peptide epitope 9-mer core regions corresponding to a nine residue sequence comprising the DR3a submotif (wherein position 1 of the motif is at position 1 of the nine residue core) are set forth in Table XXa. Respective exemplary peptide epitopes of 15 amino acid residues in length, each of which comprise the nine residue core, are also shown in Table XXa along with binding data for the exemplary peptides.

[0137] Potential peptide epitope 9-mer core regions comprising the DR3b submotif and respective exemplary 15-mer peptides comprising the DR3 submotif-b epitope are set forth in Table XXb along with binding data for the exemplary peptides.

[0138] Each of the HLA class I or class II peptide epitopes set out in the Tables herein are deemed singly to be an inventive aspect of this application. Further, it is also an inventive aspect of this application that each peptide epitope may be used in combination with any other peptide epitope.

### IV.E. Enhancing Population Coverage of the Vaccine

[0139] Vaccines that have broad population coverage are preferred because they are more commercially viable and generally applicable to the most people. Broad population coverage can be obtained using the peptides of the invention (and nucleic acid compositions that encode such peptides) through selecting peptide epitopes that bind to HLA alleles which, when considered in total, are present in most of the population. Table XXI lists the overall frequencies of the HLA class I supertypes in various ethnicities (Table XXIa) and the combined population coverage achieved by the A2-, A3-, and B7-supertypes (Table XXIb). The A2-, A3-, and B7 supertypes are each present on the average of over 40% in each of these five major ethnic groups. Coverage in excess of 80% is achieved with a combination of these supermotifs. These results suggest that effective and non-ethnically biased population coverage is achieved upon use of a limited number of cross-reactive peptides. Although the population coverage reached with these three main peptide specificities is high, coverage can be expanded to reach 95% population coverage and above, and more easily achieve truly multispecific responses upon use of additional supermotif or allele-specific motif bearing peptides.

[0140] The B44-, A1-, and A24-supertypes are each present, on average, in a range from 25% to 40% in these major ethnic populations (Table XXIa). While less prevalent overall, the B27-, B58-, and B62 supertypes are each present with a frequency >25% in at least one major ethnic group (Table XXIa). Table XXIb summarizes the estimated prevalence of combinations of HLA supertypes that have been identified in five major ethnic groups. The incremental coverage obtained by the inclusion of A1,-A24-, and B44-supertypes to the A2, A3, and B7 coverage and coverage obtained with all of the supertypes described herein, is shown.

[0141] The data presented herein, together with the previous definition of the A2-, A3-, and B7-supertypes, indicates that all antigens, with the possible exception of A29, B8, and B46, can be classified into a total of nine HLA supertypes. By including epitopes from the six most frequent supertypes, an average population coverage of 99% is obtained for five major ethnic groups.

### IV.F. Immune Response-Stimulating Peptide Analogs

[0142] In general, CTL and HTL responses are not directed against all possible epitopes. Rather, they are restricted to a few “immunodominant” determinants (Zinkernagel, et al., Adv. Immunol. 27:5159, 1979; Bennink, et al., J. Exp. Med. 168:19351939, 1988; Rawle, et al., J. Immunol. 146:3977-3984, 1991). It has been recognized that immunodominance (Benacerraf, et al., Science 175:273-279, 1972) could be explained by either the ability of a given epitope to selectively bind a particular HLA protein (determinant selection theory) (Vitiello, et al., J. Immunol. 131:1635, 1983); Rosenthal, et al., Nature 267:156-158, 1977), or to be selectively recognized by the existing TCR (T cell receptor) specificities (repertoire theory) (Klein, J., IMMUNOLOGY, THE SCIENCE OF SELF/NONSELF DISCRIMINATION, John Wiley & Sons, New York, pp. 270-310, 1982). It has been demonstrated that additional factors, mostly linked to processing events, can also play a key role in dictating, beyond strict immunogenicity, which of the many potential determinants will be presented as immunodominant (Sercarz, et al., Annu. Rev. Immunol. 11:729-766, 1993).

[0143] Because tissue specific and developmental TAAs are expressed on normal tissue at least at some point in time or location within the body, it may be expected that T cells to them, particularly dominant epitopes, are eliminated during immunological surveillance and that tolerance is induced. However, CTL responses to tumor epitopes in both normal donors and cancer patient has been detected, which may indicate that tolerance is incomplete (see, e.g., Kawashima et al., Hum. Immunol. 59:1, 1998; Tsang, J. Natl. Cancer Inst. 87:82-90, 1995; Rongcun et al., J. Immunol. 163:1037, 1999). Thus, immune tolerance does not completely eliminate or inactivate CTL precursors capable of recognizing high affinity HLA class I binding peptides.

[0144] An additional strategy to overcome tolerance is to use analog peptides. Without intending to be bound by theory, it is believed that because T cells to dominant epitopes may have been clonally deleted, selecting subdominant epitopes may allow existing T cells to be recruited, which will then lead to a therapeutic or prophylactic response. However, the binding of HLA molecules to subdominant epitopes is often less vigorous than to dominant ones. Accordingly, there is a need to be able to modulate the binding affinity of particular immunogenic epitopes for one or more HLA molecules, and thereby to modulate the immune response elicited by the peptide, for example to prepare analog peptides which elicit a more vigorous response.

[0145] Although peptides with suitable cross-reactivity among all alleles of a superfamily are identified by the screening procedures described above, cross-reactivity is not always as complete as possible, and in certain cases procedures to increase cross-reactivity of peptides can be useful; moreover, such procedures can also be used to modify other properties of the peptides such as binding affinity or peptide stability. Having established the general rules that govern cross-reactivity of peptides for HLA alleles within a given motif or supermotif, modification (i.e., analoging) of the structure of peptides of particular interest in order to achieve broader (or otherwise modified) HLA binding capacity can be performed. More specifically, peptides which exhibit the broadest cross-reactivity patterns, can be produced in accordance with the teachings herein. The present concepts related to analog generation are set forth in greater detail in co-pending U.S. Ser. No. 09/226,775 filed Jan. 6, 1999.

[0146] In brief, the strategy employed utilizes the motifs or supermotifs which correlate with binding to certain HLA molecules. The motifs or supermotifs are defined by having primary anchors, and in many cases secondary anchors. Analog peptides can be created by substituting amino acid residues at primary anchor, secondary anchor, or at primary and secondary anchor positions. Generally, analogs are made for peptides that already bear a motif or supermotif. Preferred secondary anchor residues of supermotifs and motifs that have been defined for HLA class I and class II binding peptides are shown in Tables II and III, respectively.

[0147] For a number of the motifs or supermotifs in accordance with the invention, residues are defined which are deleterious to binding to allele-specific HLA molecules or members of HLA supertypes that bind the respective motif or supermotif (Tables II and III). Accordingly, removal of such residues that are detrimental to binding can be performed in accordance with the present invention. For example, in the case of the A3 supertype, when all peptides that have such deleterious residues are removed from the population of peptides used in the analysis, the incidence of cross-reactivity increased from 22% to 37% (see, e.g., Sidney, J. et al., Hu. Immunol. 45:79, 1996). Thus, one strategy to improve the cross-reactivity of peptides within a given supermotif is simply to delete one or more of the deleterious residues present within a peptide and substitute a small “neutral” residue such as Ala (that may not influence T cell recognition of the peptide). An enhanced likelihood of cross-reactivity is expected if, together with elimination of detrimental residues within a peptide, “preferred” residues associated with high affinity binding to an allele-specific HLA molecule or to multiple HLA molecules within a superfamily are inserted.

[0148] To ensure that an analog peptide, when used as a vaccine, actually elicits a CTL response to the native epitope in vivo (or, in the case of class II epitopes, elicits helper T cells that cross-react with the wild type peptides), the analog peptide may be used to immunize T cells in vitro from individuals of the appropriate HLA allele. Thereafter, the immunized cells' capacity to induce lysis of wild type peptide sensitized target cells is evaluated. It will be desirable to use as antigen presenting cells, cells that have been either infected, or transfected with the appropriate genes, or, in the case of class II epitopes only, cells that have been pulsed with whole protein antigens, to establish whether endogenously produced antigen is also recognized by the relevant T cells.

[0149] Another embodiment of the invention is to create analogs of weak binding peptides, to thereby ensure adequate numbers of cross-reactive cellular binders. Class I binding peptides exhibiting binding affinities of 500-5000 nM, and carrying an acceptable but suboptimal primary anchor residue at one or both positions can be “fixed” by substituting preferred anchor residues in accordance with the respective supertype. The analog peptides can then be tested for crossbinding activity.

[0150] Another embodiment for generating effective peptide analogs involves the substitution of residues that have an adverse impact on peptide stability or solubility in, e.g., a liquid environment. This substitution may occur at any position of the peptide epitope. For example, a cysteine can be substituted out in favor of α-amino butyric acid (“B” in the single letter abbreviations for peptide sequences listed herein). Due to its chemical nature, cysteine has the propensity to form disulfide bridges and sufficiently alter the peptide structurally so as to reduce binding capacity. Substituting α-amino butyric acid for cysteine not only alleviates this problem, but actually improves binding and crossbinding capability in certain instances (see, e.g., the review by Sette et al., In: Persistent Viral Infections, Eds. R. Ahmed and I. Chen, John Wiley & Sons, England, 1999).

[0151] Representative analog peptides are set forth in Tables XXII-XXVI. The Table indicates the length and sequence of the analog peptide as well as the motif or supermotif, if appropriate. The “source” column indicates the residues substituted at the indicated position numbers for the respective analog.

### IV.G. Computer Screening of Protein Sequences from Disease-Related Antigens for Supermotif- or Motif-Bearing Peptides

[0152] In order to identify supermotif- or motif-bearing epitopes in a target antigen, a native protein sequence, e.g., a tumor-associated antigen, or sequences from an infectious organism, or a donor tissue for transplantation, is screened using a means for computing, such as an intellectual calculation or a computer, to determine the presence of a supermotif or motif within the sequence. The information obtained from the analysis of native peptide can be used directly to evaluate the status of the native peptide or may be utilized subsequently to generate the peptide epitope.

[0153] Computer programs that allow the rapid screening of protein sequences for the occurrence of the subject supermotifs or motifs are encompassed by the present invention; as are programs that permit the generation of analog peptides. These programs are implemented to analyze any identified amino acid sequence or operate on an unknown sequence and simultaneously determine the sequence and identify motif-bearing epitopes thereof; analogs can be simultaneously determined as well. Generally, the identified sequences will be from a pathogenic organism or a tumor-associated peptide. For example, the target TAA molecules include, without limitation, CEA, MAGE, p53 and HER2/neu.

[0154] It is important that the selection criteria utilized for prediction of peptide binding are as accurate as possible, to correlate most efficiently with actual binding. Prediction of peptides that bind, for example, to HLA-A*0201, on the basis of the presence of the appropriate primary anchors, is positive at about a 30% rate (see, e.g., Ruppert, J. et al. Cell 74:929, 1993). However, by extensively analyzing peptide-HLA binding data disclosed herein, data in related patent applications, and data in the art, the present inventors have developed a number of allele-specific polynomial algorithms that dramatically increase the predictive value over identification on the basis of the presence of primary anchor residues alone. These algorithms take into account not only the presence or absence of primary anchors, but also consider the positive or deleterious presence of secondary anchor residues (to account for the impact of different amino acids at different positions). The algorithms are essentially based on the premise that the overall affinity (or ΔG) of peptide-HLA interactions can be approximated as a linear polynomial function of the type:

ΔG=a₁ᵢ×a₂ᵢ×a₃ᵢ . . . ×aₙᵢ

[0155] where ad is a coefficient that represents the effect of the presence of a given amino acid (j) at a given position (i) along the sequence of a peptide of n amino acids. An important assumption of this method is that the effects at each position are essentially independent of each other. This assumption is justified by studies that demonstrated that peptides are bound to HLA molecules and recognized by T cells in essentially an extended conformation. Derivation of specific algorithm coefficients has been described, for example, in Gulukota, K. et al., J. Mol. Biol. 267:1258, 1997.

[0156] Additional methods to identify preferred peptide sequences, which also make use of specific motifs, include the use of neural networks and molecular modeling programs (see, e.g. Milik et al., Nature Biotechnology 16:753, 1998; Altuvia et al., Hum. Immunol. 58:1, 1997; Altuvia et al, J. Mol. Biol. 249:244, 1995; Buus, S. Curr. Opin. Immunol. 11:209-213, 1999; Brusic, V. et al., Bioinformatics 14:121-130, 1998; Parker et al., J. Immunol. 152:163, 1993; Meister et al., Vaccine 13:581, 1995; Hammer et al., J. Exp. Med. 180:2353, 1994; Sturniolo et al., Nature Biotechnol. 17:555 1999).

[0157] For example, it has been shown that in sets of A*0201 motif-bearing peptides containing at least one preferred secondary anchor residue while avoiding the presence of any deleterious secondary anchor residues, 69% of the peptides will bind A*0201 with an IC₅₀ less than 500 nM (Ruppert, J. et al. Cell 74:929, 1993). These algorithms are also flexible in that cut-off scores may be adjusted to select sets of peptides with greater or lower predicted binding properties, as desired.

[0158] In utilizing computer screening to identify peptide epitopes, a protein sequence or translated sequence may be analyzed using software developed to search for motifs, for example the “FINDPATTERNS” program (Devereux, et al. Nucl. Acids Res. 12:387-395, 1984) or MotifSearch 1.4 software program (D. Brown, San Diego, Calif.) to identify potential peptide sequences containing appropriate HLA binding motifs. The identified peptides can be scored using customized polynomial algorithms to predict their capacity to bind specific HLA class I or class II alleles. As appreciated by one of ordinary skill in the art, a large array of computer programming software and hardware options are available in the relevant art which can be employed to implement the motifs of the invention in order to evaluate (e.g., without limitation, to identify epitopes, identify epitope concentration per peptide length, or to generate analogs) known or unknown peptide sequences.

[0159] In accordance with the procedures described above, HER2/neu peptide epitopes and analogs thereof that are able to bind HLA supertype groups or allele-specific HLA molecules have been identified (Tables VII-XX; Table XXII-XXXI).

### IV.H. Preparation of Peptide Epitopes

[0160] Peptides in accordance with the invention can be prepared synthetically, by recombinant DNA technology or chemical synthesis, or from natural sources such as native tumors or pathogenic organisms. Peptide epitopes may be synthesized individually or as polyepitopic peptides. Although the peptide will preferably be substantially free of other naturally occurring host cell proteins and fragments thereof, in some embodiments the peptides may be synthetically conjugated to native fragments or particles.

[0161] The peptides in accordance with the invention can be a variety of lengths, and either in their neutral (uncharged) forms or in forms which are salts. The peptides in accordance with the invention are either free of modifications such as glycosylation, side chain oxidation, or phosphorylation; or they contain these modifications, subject to the condition that modifications do not destroy the biological activity of the peptides as described herein.

[0162] When possible, it may be desirable to optimize HLA class I binding epitopes of the invention, such as can be used in a polyepitopic construct, to a length of about 8 to about 13 amino acid residues, often 8 to 11, preferably 9 to 10. HLA class II binding peptide epitopes of the invention may be optimized to a length of about 6 to about 30 amino acids in length, preferably to between about 13 and about 20 residues. Preferably, the peptide epitopes are commensurate in size with endogenously processed pathogen-derived peptides or tumor cell peptides that are bound to the relevant HLA molecules, however, the identification and preparation of peptides that comprise epitopes of the invention can also be carried out using the techniques described herein.

[0163] In alternative embodiments, epitopes of the invention can be linked as a polyepitopic peptide, or as a minigene that encodes a polyepitopic peptide.

[0164] In another embodiment, it is preferred to identify native peptide regions that contain a high concentration of class I and/or class II epitopes. Such a sequence is generally selected on the basis that it contains the greatest number of epitopes per amino acid length. It is to be appreciated that epitopes can be present in a nested or overlapping manner, e.g. a 10 amino acid long peptide could contain two 9 amino acid long epitopes and one 10 amino acid long epitope; upon intracellular processing, each epitope can be exposed and bound by an HLA molecule upon administration of such a peptide. This larger, preferably multi-epitopic, peptide can be generated synthetically, recombinantly, or via cleavage from the native source.

[0165] The peptides of the invention can be prepared in a wide variety of ways. For the preferred relatively short size, the peptides can be synthesized in solution or on a solid support in accordance with conventional techniques. Various automatic synthesizers are commercially available and can be used in accordance with known protocols. (See, for example, Stewart & Young, SOLID PHASE PEPTIDE SYNTHESIS, 2D. ED., Pierce Chemical Co., 1984). Further, individual peptide epitopes can be joined using chemical ligation to produce larger peptides that are still within the bounds of the invention.

[0166] Alternatively, recombinant DNA technology can be employed wherein a nucleotide sequence which encodes an immunogenic peptide of interest is inserted into an expression vector, transformed or transfected into an appropriate host cell and cultivated under conditions suitable for expression. These procedures are generally known in the art, as described generally in Sambrook et al., MOLECULAR CLONING, A LABORATORY MANUAL, Cold Spring Harbor Press, Cold Spring Harbor, N.Y. (1989). Thus, recombinant polypeptides which comprise one or more peptide sequences of the invention can be used to present the appropriate T cell epitope.

[0167] The nucleotide coding sequence for peptide epitopes of the preferred lengths contemplated herein can be synthesized by chemical techniques, for example, the phosphotriester method of Matteucci, et al., J. Am. Chem. Soc. 103:3185 (1981). Peptide analogs can be made simply by substituting the appropriate and desired nucleic acid base(s) for those that encode the native peptide sequence; exemplary nucleic acid substitutions are those that encode an amino acid defined by the motifs/supermotifs herein. The coding sequence can then be provided with appropriate linkers and ligated into expression vectors commonly available in the art, and the vectors used to transform suitable hosts to produce the desired fusion protein. A number of such vectors and suitable host systems are now available. For expression of the fusion proteins, the coding sequence will be provided with operably linked start and stop codons, promoter and terminator regions and usually a replication system to provide an expression vector for expression in the desired cellular host. For example, promoter sequences compatible with bacterial hosts are provided in plasmids containing convenient restriction sites for insertion of the desired coding sequence. The resulting expression vectors are transformed into suitable bacterial hosts. Of course, yeast, insect or mammalian cell hosts may also be used, employing suitable vectors and control sequences.

### IV.I. Assays to Detect T-Cell Responses

[0168] Once HLA binding peptides are identified, they can be tested for the ability to elicit a T-cell response. The preparation and evaluation of motif-bearing peptides are described in PCT publications WO 94/20127 and WO 94/03205. Briefly, peptides comprising epitopes from a particular antigen are synthesized and tested for their ability to bind to the appropriate HLA proteins. These assays may involve evaluating the binding of a peptide of the invention to purified HLA class I molecules in relation to the binding of a radioiodinated reference peptide. Alternatively, cells expressing empty class I molecules (i.e. lacking peptide therein) may be evaluated for peptide binding by immunofluorescent staining and flow microfluorimetry. Other assays that may be used to evaluate peptide binding include peptide-dependent class I assembly assays and/or the inhibition of CTL recognition by peptide competition. Those peptides that bind to the class I molecule, typically with an affinity of 500 nM or less, are further evaluated for their ability to serve as targets for CTLs derived from infected or immunized individuals, as well as for their capacity to induce primary in vitro or in vivo CTL responses that can give rise to CTL populations capable of reacting with selected target cells associated with a disease. Corresponding assays are used for evaluation of HLA class II binding peptides. HLA class II motif-bearing peptides that are shown to bind, typically at an affinity of 1000 nM or less, are further evaluated for the ability to stimulate HTL responses.

[0169] Conventional assays utilized to detect T cell responses include proliferation assays, lymphokine secretion assays, direct cytotoxicity assays, and limiting dilution assays. For example, antigen-presenting cells that have been incubated with a peptide can be assayed for the ability to induce CTL responses in responder cell populations. Antigen-presenting cells can be normal cells such as peripheral blood mononuclear cells or dendritic cells. Alternatively, mutant non-human mammalian cell lines that are deficient in their ability to load class I molecules with internally processed peptides and that have been transfected with the appropriate human class I gene, may be used to test for the capacity of the peptide to induce in vitro primary CTL responses.

[0170] Peripheral blood mononuclear cells (PBMCs) may be used as the responder cell source of CTL precursors. The appropriate antigen-presenting cells are incubated with peptide, after which the peptide-loaded antigen-presenting cells are then incubated with the responder cell population under optimized culture conditions. Positive CTL activation can be determined by assaying the culture for the presence of CTLs that kill radio-labeled target cells, both specific peptide-pulsed targets as well as target cells expressing endogenously processed forms of the antigen from which the peptide sequence was derived.

[0171] More recently, a method has been devised which allows direct quantification of antigen-specific T cells by staining with Fluorescein-labelled HLA tetrameric complexes (Altman; J. D. et al., Proc. Natl. Acad. Sci. USA 90:10330, 1993; Altman, J. D. et al., Science 274:94, 1996). Other relatively recent technical developments include staining for intracellular lymphokines, and interferon-y release assays or ELISPOT assays. Tetramer staining, intracellular lymphokine staining and ELISPOT assays all appear to be at least 10-fold more sensitive than more conventional assays (Lalvani, A. et al., J. Exp. Med. 186:859, 1997; Dunbar, P. R. et al., Curr. Biol. 8:413, 1998; Murali-Krishna, K. et al., Immunity 8:177, 1998).

[0172] HTL activation may also be assessed using such techniques known to those in the art such as T cell proliferation and secretion of lymphokines, e.g. IL-2 (see, e.g. Alexander et al., Immunity 1:751-761, 1994).

[0173] Alternatively, immunization of HLA transgenic mice can be used to determine immunogenicity of peptide epitopes. Several transgenic mouse models including mice with human A2.1, A11 (which can additionally be used to analyze HLA-A3 epitopes), and B7 alleles have been characterized and others (e.g., transgenic mice for HLA-A1 and A24) are being developed. HLA-DR1 and HLA-DR3 mouse models have also been developed. Additional transgenic mouse models with other HLA alleles may be generated as necessary. Mice may be immunized with peptides emulsified in Incomplete Freund's Adjuvant and the resulting T cells tested for their capacity to recognize peptide-pulsed target cells and target cells transfected with appropriate genes. CTL responses may be analyzed using cytotoxicity assays described above. Similarly, HTL responses may be analyzed using such assays as T cell proliferation or secretion of lymphokines.

### IV.J. Use of Peptide Epitopes as Diagnostic Agents and for Evaluating Immune Responses

[0174] In one embodiment of the invention, HLA class I and class II binding peptides as described herein are used as reagents to evaluate an immune response. The immune response to be evaluated is induced by using as an immunogen any agent that may result in the production of antigen-specific CTLs or HTLs that recognize and bind to the peptide epitope(s) to be employed as the reagent The peptide reagent need not be used as the immunogen. Assay systems that are used for such an analysis include relatively recent technical developments such as tetramers, staining for intracellular lymphokines and interferon release assays, or ELISPOT assays.

[0175] For example, peptides of the invention are used in tetramer staining assays to assess peripheral blood mononuclear cells for the presence of antigen-specific CTLs following exposure to a tumor cell antigen or an immunogen. The HLA-tetrameric complex is used to directly visualize antigen-specific CTLs (see, e.g., Ogg et al., Science 279:2103-2106, 1998; and Altman et al., Science 174:94-96, 1996) and determine the frequency of the antigen-specific CTL population in a sample of peripheral blood mononuclear cells. A tetramer reagent using a peptide of the invention is generated as follows: A peptide that binds to an HLA molecule is refolded in the presence of the corresponding HLA heavy chain and β₂-microglobulin to generate a trimolecular complex. The complex is biotinylated at the carboxyl terminal end of the heavy chain at a site that was previously engineered into the protein. Tetramer formation is then induced by the addition of streptavidin. By means of fluorescently labeled streptavidin, the tetramer can be used to stain antigen-specific cells. The cells can then be identified, for example, by flow cytometry. Such an analysis may be used for diagnostic or prognostic purposes. Cells identified by the procedure can also be used for therapeutic purposes.

[0176] Peptides of the invention are also used as reagents to evaluate immune recall responses (see, e.g., Bertoni et al., J. Clin. Invest. 100:503-513, 1997 and Penna et al., J. Exp. Med. 174:1565-1570, 1991). For example, patient PBMC samples from individuals with cancer are analyzed for the presence of antigen-specific CTLs or HTLs using specific peptides. A blood sample containing mononuclear cells can be evaluated by cultivating the PBMCs and stimulating the cells with a peptide of the invention. After an appropriate cultivation period, the expanded cell population can be analyzed, for example, for CTL or for HTL activity.

[0177] The peptides are also used as reagents to evaluate the efficacy of a vaccine. PBMCs obtained from a patient vaccinated with an immunogen are analyzed using, for example, either of the methods described above. The patient is HLA typed, and peptide epitope reagents that recognize the allele-specific molecules present in that patient are selected for the analysis. The immunogenicity of the vaccine is indicated by the presence of epitope-specific CTLs and/or HTLs in the PBMC sample.

[0178] The peptides of the invention are also used to make antibodies, using techniques well known in the art (see, e.g. CURRENT PROTOCOLS IN IMMUNOLOGY, Wiley/Greene, NY; and Antibodies A Laboratory Manual, Harlow and Lane, Cold Spring Harbor Laboratory Press, 1989), which may be useful as reagents to diagnose or monitor cancer. Such antibodies include those that recognize a peptide in the context of an HLA molecule, i.e., antibodies that bind to a peptide-MHC complex.

### IV.K. Vaccine Compositions

[0179] Vaccines and methods of preparing vaccines that contain an immunogenically effective amount of one or more peptides as described herein are further embodiments of the invention. Once appropriately immunogenic epitopes have been defined, they can be sorted and delivered by various means, herein referred to as “vaccine” compositions. Such vaccine compositions can include, for example, lipopeptides (e.g., Vitiello, A. et al., J. Clin. Invest. 95:341, 1995), peptide compositions encapsulated in poly(DL-lactide-co-glycolide) (“PLG”) microspheres (see, e.g., Eldridge, et al., Molec. Immunol. 28:287-294, 1991: Alonso et al., Vaccine 12:299-306, 1994; Jones et al., Vaccine 13:675-681, 1995), peptide compositions contained in immune stimulating complexes (ISCOMS) (see, e.g., Takahashi et al., Nature 344:873-875, 1990; Hu et al., Clin Exp Immunol. 113:235-243, 1998), multiple antigen peptide systems (MAPs) (see e.g., Tam, J. P., Proc. Natl. Acad. Sci. U.S.A. 85:5409-5413, 1988; Tam, J. P., J. Immunol. Methods 196:17-32, 1996), peptides formulated as multivalent peptides; peptides for use in ballistic delivery systems, typically crystallized peptides, viral delivery vectors (Perkus, M. E. et al., In: Concepts in vaccine development, Kaufmann, S. H. E., ed., p. 379, 1996; Chakrabarti, S. et al., Nature 320:535, 1986; Hu, S. L. et al., Nature 320:537, 1986; Kieny, M.-P. et al., AIDS Bio/Technology 4:790, 1986; Top, F. H. et al., J. Infect. Dis. 124:148, 1971; Chanda, P. K. et al., Virology 175:535, 1990), particles of viral or synthetic origin (e.g., Kofler, N. et al., J. Immunol. Methods. 192:25, 1996; Eldridge, J. H. et al., Sem. Hematol. 30:16, 1993; Falo, L. D., Jr. et al., Nature Med. 7:649, 1995), adjuvants (Warren, H. S., Vogel, F. R., and Chedid, L. A. Annu. Rev. Immunol. 4:369, 1986; Gupta, R. K. et al., Vaccine 11:293, 1993), liposomes (Reddy, R. et al., J. Immunol. 148:1585, 1992; Rock, K. L., Immunol. Today 17:131, 1996), or, naked or particle absorbed cDNA (Ulmer, J. B. et al., Science 259:1745, 1993; Robinson, H. L., Hunt, L. A., and Webster, R. G., Vaccine 11:957, 1993; Shiver, J. W. et al., In: Concepts in vaccine development, Kaufmann, S. H. E., ed., p. 423, 1996; Cease, K. B., and Berzofsky, J. A., Annu. Rev. Immunol. 12:923, 1994 and Eldridge, J. H. et al., Sem. Hematol. 30:16, 1993). Toxin-targeted delivery technologies, also known as receptor mediated targeting, such as those of Avant Immunotherapeutics, Inc. (Needham, Mass.) may also be used.

[0180] Vaccines of the invention include nucleic acid-mediated modalities. DNA or RNA encoding one or more of the peptides of the invention can also be administered to a patient. This approach is described, for instance, in Wolff et. al., Science 247:1465 (1990) as well as U.S. Pat. Nos. 5,580,859; 5,589,466; 5,804,566; 5,739,118; 5,736,524; 5,679,647; WO 98/04720; and in more detail below. Examples of DNA-based delivery technologies include “naked DNA”, facilitated (bupivicaine, polymers, peptide-mediated) delivery, cationic lipid complexes, and particle-mediated (“gene gun”) or pressure-mediated delivery (see, e.g., U.S. Pat. No. 5,922,687).

[0181] For therapeutic or prophylactic immunization purposes, the peptides of the invention can also be expressed by viral or bacterial vectors. Examples of expression vectors include attenuated viral hosts, such as vaccinia or fowlpox. As an example of this approach, vaccinia virus is used as a vector to express nucleotide sequences that encode the peptides of the invention. Upon introduction into a host bearing a tumor, the recombinant vaccinia virus expresses the immunogenic peptide, and thereby elicits a host CTL and/or HTL response. Vaccinia vectors and methods useful in immunization protocols are described in, e.g., U.S. Pat. No. 4,722,848. Another vector is BCG (Bacille Calmette Guerin). BCG vectors are described in Stover et al., Nature 351:456-460 (1991). A wide variety of other vectors useful for therapeutic administration or immunization of the peptides of the invention, e.g. adeno and adeno-associated virus vectors, retroviral vectors, Salmonella typhi vectors, detoxified anthrax toxin vectors, and the like, will be apparent to those skilled in the art from the description herein.

[0182] Furthermore, vaccines in accordance with the invention encompass compositions of one or more of the claimed peptides. A peptide can be present in a vaccine individually. Alternatively, the peptide can exist as a homopolymer comprising multiple copies of the same peptide, or as a heteropolymer of various peptides. Polymers have the advantage of increased immunological reaction and, where different peptide epitopes are used to make up the polymer, the additional ability to induce antibodies and/or CTLs that react with different antigenic determinants of the pathogenic organism or tumor-related peptide targeted for an immune response. The composition can be a naturally occurring region of an antigen or can be prepared, e.g., recombinantly or by chemical synthesis.

[0183] Carriers that can be used with vaccines of the invention are well known in the art, and include, e.g., thyroglobulin, albumins such as human serum albumin, tetanus toxoid, polyamino acids such as poly L-lysine, poly L-glutamic acid, influenza, hepatitis B virus core protein, and the like. The vaccines can contain a physiologically tolerable (i.e., acceptable) diluent such as water, or saline, preferably phosphate buffered saline. The vaccines also typically include an adjuvant. Adjuvants such as incomplete Freund's adjuvant, aluminum phosphate, aluminum hydroxide, or alum are examples of materials well known in the art. Additionally, as disclosed herein, CTL responses can be primed by conjugating peptides of the invention to lipids, such as tripalmitoyl-S-glycerylcysteinlyseryl-serine (P₃CSS).

[0184] Upon immunization with a peptide composition in accordance with the invention, via injection, aerosol, oral, transdermal, transmucosal, intrapleural, intrathecal, or other suitable routes, the immune system of the host responds to the vaccine by producing large amounts of CTLs and/or HTLs specific for the desired antigen. Consequently, the host becomes at least partially immune to later infection, or at least partially resistant to developing an ongoing chronic infection, or derives at least some therapeutic benefit when the antigen was tumor-associated.

[0185] In some embodiments, it may be desirable to combine the class I peptide components with components that induce or facilitate neutralizing antibody and or helper T cell responses to the target antigen of interest. A preferred embodiment of such a composition comprises class I and class II epitopes in accordance with the invention. An alternative embodiment of such a composition comprises a class I and/or class II epitope in accordance with the invention, along with a cross-binding HLA class II epitope such as PADRE™ (Epimmune, San Diego, Calif.) molecule (described, for example, in U.S. Pat. No. 5,736,142).

[0186] A vaccine of the invention can also include antigen-presenting cells (APC), such as dendritic cells (DC), as a vehicle to present peptides of the invention. Vaccine compositions can be created in vitro, following dendritic cell mobilization and harvesting, whereby loading of dendritic cells occurs in vitro. For example, dendritic cells are transfected, e.g., with a minigene in accordance with the invention, or are pulsed with peptides. The dendritic cell can then be administered to a patient to elicit immune responses in vivo.

[0187] Vaccine compositions, either DNA- or peptide-based, can also be administered in vivo in combination with dendritic cell mobilization whereby loading of dendritic cells occurs in vivo.

[0188] Antigenic peptides are used to elicit a CTL and/or HTL response ex vivo, as well. The resulting CTL or HTL cells, can be used to treat tumors in patients that do not respond to other conventional forms of therapy, or will not respond to a therapeutic vaccine peptide or nucleic acid in accordance with the invention. Ex vivo CTL or HTL responses to a particular tumor-associated antigen are induced by incubating in tissue culture the patient's, or genetically compatible, CTL or HTL precursor cells together with a source of antigen-presenting cells, such as dendritic cells, and the appropriate immunogenic peptide. After an appropriate incubation time (typically about 7-28 days), in which the precursor cells are activated and expanded into effector cells, the cells are infused back into the patient, where they will destroy (CTL) or facilitate destruction (HTL) of their specific target cell (an infected cell or a tumor cell). Transfected dendritic cells may also be used as antigen presenting cells.

[0189] The vaccine compositions of the invention can also be used in combination with other treatments used for cancer, including use in combination with immune adjuvants such as IL-2, IL-12, GM-CSF, and the like.

[0190] Preferably, the following principles are utilized when selecting an array of epitopes for inclusion in a polyepitopic composition for use in a vaccine, or for selecting discrete epitopes to be included in a vaccine and/or to be encoded by nucleic acids such as a minigene. Examples of epitopes that can be utilized in a vaccine to treat or prevent cancer are provided in Tables XXII-XXVII and XI. It is preferred that each of the following principles are balanced in order to make the selection. The multiple epitopes to be incorporated in a given vaccine composition can be, but need not be, contiguous in sequence in the native antigen from which the epitopes are derived.

[0191] 1.) Epitopes are selected which, upon administration, mimic immune responses that have been observed to be correlated with tumor clearance. For HLA Class I this includes 3-4 epitopes that come from at least one TAA. For HLA Class II a similar rationale is employed; again 3-4 epitopes are selected from at least one TAA (see e.g., Rosenberg et al., Science 278:1447-1450). Epitopes from one TAA may be used in combination with epitopes from one or more additional TAAs to produce a vaccine that targets tumors with varying expression patterns of frequently-expressed TAAs as described, e.g., in Example 15.

[0192] 2.) Epitopes are selected that have the requisite binding affinity established to be correlated with immunogenicity: for HLA Class I an IC₅₀ of 500 nM or less, or for Class II an IC₅₀ of 1000 nM or less.

[0193] 3.) Sufficient supermotif bearing-peptides, or a sufficient array of allele-specific motif-bearing peptides, are selected to give broad population coverage. For example, it is preferable to have at least 80% population coverage. A Monte Carlo analysis, a statistical evaluation known in the art, can be employed to assess the breadth, or redundancy of, population coverage.

[0194] 4.) When selecting epitopes from cancer-related antigens it is often useful to select analogs because the patient may have developed tolerance to the native epitope. When selecting epitopes for infectious disease-related antigens it is preferable to select either native or analoged epitopes.

[0195] 5.) Of particular relevance are epitopes referred to as “nested epitopes.” Nested epitopes occur where at least two epitopes overlap in a given peptide sequence. A nested peptide sequence can comprise both HLA class I and HLA class II epitopes. When providing nested epitopes, a general objective is to provide the greatest number of epitopes per sequence. Thus, an aspect is to avoid providing a peptide that is any longer than the amino terminus of the amino terminal epitope and the carboxyl terminus of the carboxyl terminal epitope in the peptide. When providing a multi-epitopic sequence, such as a sequence comprising nested epitopes, it is generally important to screen the sequence in order to insure that it does not have pathological or other deleterious biological properties.

[0196] 6.) If a polyepitopic protein is created, or when creating a minigene, an objective is to generate the smallest peptide that encompasses the epitopes of interest. This principle is similar, if not the same as that employed when selecting a peptide comprising nested epitopes. However, with an artificial polyepitopic peptide, the size minimization objective is balanced against the need to integrate any spacer sequences between epitopes in the polyepitopic protein. Spacer amino acid residues can, for example, be introduced to avoid junctional epitopes (an epitope recognized by the immune system, not present in the target antigen, and only created by the man-made juxtaposition of epitopes), or to facilitate cleavage between epitopes and thereby enhance epitope presentation. Junctional epitopes are generally to be avoided because the recipient may generate an immune response to that non-native epitope. Of particular concern is a junctional epitope that is a “dominant epitope.” A dominant epitope may lead to such a zealous response that immune responses to other epitopes are diminished or suppressed.

[0197] IV.K.1. Minigene Vaccines

[0198] A number of different approaches are available which allow simultaneous delivery of multiple epitopes. Nucleic acids encoding the peptides of the invention are a particularly useful embodiment of the invention. Epitopes for inclusion in a minigene are preferably selected according to the guidelines set forth in the previous section. A preferred means of administering nucleic acids encoding the peptides of the invention uses minigene constructs encoding a peptide comprising one or multiple epitopes of the invention.

[0199] The use of multi-epitope minigenes is described below and in, e.g., co-pending application U.S. Ser. No. 09/311,784; Ishioka et al., J. Immunol. 162:3915-3925, 1999; An, L. and Whitton, J. L., J. Virol. 71:2292, 1997; Thomson, S. A. et al., J. Immunol. 157:822, 1996; Whitton, J. L. et al., J. Virol. 67:348, 1993; Hanke, R. et al., Vaccine 16:426, 1998. For example, a multi-epitope DNA plasmid encoding supermotif- and/or motif-bearing HER2/neu epitopes derived from multiple regions of HER2/neu, a universal helper T epitope, e.g., PADRE™ (or multiple HTL epitopes from HER2/neu), and an endoplasmic reticulum-translocating signal sequence can be engineered. A vaccine may also comprise epitopes, in addition to HER2/neu epitopes, that are derived from other TAAs.

[0200] The immunogenicity of a multi-epitopic minigene can be tested in transgenic mice to evaluate the magnitude of CTL induction responses against the epitopes tested. Further, the immunogenicity of DNA-encoded epitopes in vivo can be correlated with the in vitro responses of specific CTL lines against target cells transfected with the DNA plasmid. Thus, these experiments can show that the minigene serves to both: 1.) generate a CTL response and 2.) that the induced CTLs recognized cells expressing the encoded epitopes.

[0201] For example, to create a DNA sequence encoding the selected epitopes (minigene) for expression in human cells, the amino acid sequences of the epitopes may be reverse translated. A human codon usage table can be used to guide the codon choice for each amino acid. These epitope-encoding DNA sequences may be directly adjoined, so that when translated, a continuous polypeptide sequence is created. To optimize expression and/or immunogenicity, additional elements can be incorporated into the minigene design. Examples of amino acid sequences that can be reverse translated and included in the minigene sequence include: HLA class I epitopes, HLA class II epitopes, a ubiquitination signal sequence, and/or an endoplasmic reticulum targeting signal. In addition, HLA presentation of CTL and HTL epitopes may be improved by including synthetic (e.g. poly-alanine) or naturally-occurring flanking sequences adjacent to the CTL or HTL epitopes; these larger peptides comprising the epitope(s) are within the scope of the invention.

[0202] The minigene sequence may be converted to DNA by assembling oligonucleotides that encode the plus and minus strands of the minigene. Overlapping oligonucleotides (30-100 bases long) may be synthesized, phosphorylated, purified and annealed under appropriate conditions using well known techniques. The ends of the oligonucleotides can be joined, for example, using T4 DNA ligase. This synthetic minigene, encoding the epitope polypeptide, can then be cloned into a desired expression vector.

[0203] Standard regulatory sequences well known to those of skill in the art are preferably included in the vector to ensure expression in the target cells. Several vector elements are desirable: a promoter with a down-stream cloning site for minigene insertion; a polyadenylation signal for efficient transcription termination; an E. coli origin of replication; and an E. coli selectable marker (e.g. ampicillin or kanamycin resistance). Numerous promoters can be used for this purpose, e.g., the human cytomegalovirus (hCMV) promoter. See, e.g., U.S. Pat. Nos. 5,580,859 and 5,589,466 for other suitable promoter sequences.

[0204] Additional vector modifications may be desired to optimize minigene expression and immunogenicity. In some cases, introns are required for efficient gene expression, and one or more synthetic or naturally-occurring introns could be incorporated into the transcribed region of the minigene. The inclusion of mRNA stabilization sequences and sequences for replication in mammalian cells may also be considered for increasing minigene expression.

[0205] Once an expression vector is selected, the minigene is cloned into the polylinker region downstream of the promoter. This plasmid is transformed into an appropriate E. coli strain, and DNA is prepared using standard techniques. The orientation and DNA sequence of the minigene, as well as all other elements included in the vector, are confirmed using restriction mapping and DNA sequence analysis. Bacterial cells harboring the correct plasmid can be stored as a master cell bank and a working cell bank.

[0206] In addition, immunostimulatory sequences (ISSs or CpGs) appear to play a role in the immunogenicity of DNA vaccines. These sequences may be included in the vector, outside the minigene coding sequence, if desired to enhance immunogenicity.

[0207] In some embodiments, a bi-cistronic expression vector which allows production of both the minigene-encoded epitopes and a second protein (included to enhance or decrease immunogenicity) can be used. Examples of proteins or polypeptides that could beneficially enhance the immune response if co-expressed include cytokines (e.g., IL-2, IL-12, GM-CSF), cytokine-inducing molecules (e.g., LeIF), costimulatory molecules, or for HTL responses, pan-DR binding proteins (PADRE™, Epimmune, San Diego, Calif.). Helper (HTL) epitopes can be joined to intracellular targeting signals and expressed separately from expressed CTL epitopes; this allows direction of the HTL epitopes to a cell compartment different than that of the CTL epitopes. If required, this could facilitate more efficient entry of HTL epitopes into the HLA class II pathway, thereby improving HTL induction. In contrast to HTL or CTL induction, specifically decreasing the immune response by co-expression of immunosuppressive molecules (e.g. TGF-β) may be beneficial in certain diseases.

[0208] Therapeutic quantities of plasmid DNA can be produced for example, by fermentation in E. coli, followed by purification. Aliquots from the working cell bank are used to inoculate growth medium, and grown to saturation in shaker flasks or a bioreactor according to well known techniques. Plasmid DNA can be purified using standard bioseparation technologies such as solid phase anion-exchange resins supplied by QIAGEN, Inc. (Valencia, Calif.). If required, supercoiled DNA can be isolated from the open circular and linear forms using gel electrophoresis or other methods.

[0209] Purified plasmid DNA can be prepared for injection using a variety of formulations. The simplest of these is reconstitution of lyophilized DNA in sterile phosphate-buffered saline (PBS). This approach, known as “naked DNA,” is currently being used for intramuscular (IM) administration in clinical trials. To maximize the immunotherapeutic effects of minigene DNA vaccines, an alternative method for formulating purified plasmid DNA may be desirable. A variety of methods have been described, and new techniques may become available. Cationic lipids, glycolipids, and fusogenic liposomes can also be used in the formulation (see, e.g., as described by WO 93/24640; Mannino & Gould-Fogerite, BioTechniques 6(7): 682 (1988); U.S. Pat. No. 5,279,833; WO 91/06309; and Felgner, et al., Proc. Nat'l Acad. Sci. USA 84:7413 (1987). In addition, peptides and compounds referred to collectively as protective, interactive, non-condensing compounds (PINC) could also be complexed to purified plasmid DNA to influence variables such as stability, intramuscular dispersion, or trafficking to specific organs or cell types.

[0210] Target cell sensitization can be used as a functional assay for expression and HLA class I presentation of minigene-encoded CTL epitopes. For example, the plasmid DNA is introduced into a mammalian cell line that is suitable as a target for standard CTL chromium release assays. The transfection method used will be dependent on the final formulation. Electroporation can be used for “naked” DNA, whereas cationic lipids allow direct in vitro transfection. A plasmid expressing green fluorescent protein (GFP) can be co-transfected to allow enrichment of transfected cells using fluorescence activated cell sorting (FACS). These cells are then chromium-51 (⁵¹Cr) labeled and used as target cells for epitope-specific CTL lines; cytolysis, detected by ⁵¹Cr release, indicates both production of, and HLA presentation of, minigene-encoded CTL epitopes. Expression of HTL epitopes may be evaluated in an analogous manner using assays to assess HTL activity.

[0211] In vivo immunogenicity is a second approach for functional testing of minigene DNA formulations. Transgenic mice expressing appropriate human HLA proteins are immunized with the DNA product. The dose and route of administration are formulation dependent (e.g., IM for DNA in PBS, intraperitoneal (IP) for lipid-complexed DNA). Twenty-one days after immunization, splenocytes are harvested and restimulated for one week in the presence of peptides encoding each epitope being tested. Thereafter, for CTL effector cells, assays are conducted for cytolysis of peptide-loaded, ⁵¹Cr-labeled target cells using standard techniques. Lysis of target cells that were sensitized by HLA loaded with peptide epitopes, corresponding to minigene-encoded epitopes, demonstrates DNA vaccine function for in vivo induction of CTLs. Immunogenicity of HTL epitopes is evaluated in transgenic mice in an analogous manner.

[0212] Alternatively, the nucleic acids can be administered using ballistic delivery as described, for instance, in U.S. Pat. No. 5,204,253. Using this technique, particles comprised solely of DNA are administered. In a further alternative embodiment, DNA can be adhered to particles, such as gold particles.

[0213] Minigenes can also be delivered using other bacterial or viral delivery systems well known in the art, e.g., an expression construct encoding epitopes of the invention can be incorporated into a viral vector such as vaccinia.

[0214] IV.K2. Combinations of CTL Peptides with Helper Peptides

[0215] Vaccine compositions comprising the peptides of the present invention, or analogs thereof, which have immunostimulatory activity may be modified to provide desired attributes, such as improved serum half-life, or to enhance immunogenicity.

[0216] For instance, the ability of a peptide to induce CTL activity can be enhanced by linking the peptide to a sequence which contains at least one epitope that is capable of inducing a T helper cell response. The use of T helper epitopes in conjunction with CTL epitopes to enhance immunogenicity is illustrated, for example, in the co-pending applications U.S. Ser. No. 08/820,360, U.S. Ser. No. 08/197,484, and U.S. Ser. No. 08/464,234.

[0217] Although a CTL peptide can be directly linked to a T helper peptide, often CTL epitope/HTL epitope conjugates are linked by a spacer molecule. The spacer is typically comprised of relatively small, neutral molecules, such as amino acids or amino acid mimetics, which are substantially uncharged under physiological conditions. The spacers are typically selected from, e.g., Ala, Gly, or other neutral spacers of nonpolar amino acids or neutral polar amino acids. It will be understood that the optionally present spacer need not be comprised of the same residues and thus may be a hetero- or homo-oligomer. When present, the spacer will usually be at least one or two residues, more usually three to six residues and sometimes 10 or more residues. The CTL peptide epitope can be linked to the T helper peptide epitope either directly or via a spacer either at the amino or carboxy terminus of the CTL peptide. The amino terminus of either the immunogenic peptide or the T helper peptide may be acylated.

[0218] In certain embodiments, the T helper peptide is one that is recognized by T helper cells present in the majority of the population. This can be accomplished by selecting amino acid sequences that bind to many, most, or all of the HLA class II molecules. These are known as “loosely HLA-restricted” or “promiscuous” T helper sequences. Examples of peptides that are promiscuous include sequences from antigens such as tetanus toxoid at positions 830-843 (QYIKANSKFIGITE), Plasmodium falciparum circumsporozoite (CS) protein at positions 378-398 (DIEKKIAKMEKASSVFNVVNS), and Streptococcus 18 kD protein at positions 116 (GAVDSILGGVATYGAA). Other examples include peptides bearing a DR 1-4-7 supermotif, or either of the DR3 motifs.

[0219] Alternatively, it is possible to prepare synthetic peptides capable of stimulating T helper lymphocytes, in a loosely HLA-restricted fashion, using amino acid sequences not found in nature (see, e.g. PCT publication WO 95/07707). These synthetic compounds called Pan-DR-binding epitopes (e.g., PADRE™, Epimmune, Inc., San Diego, Calif.) are designed to most preferrably bind most HLA-DR (human HLA class II) molecules. For instance, a pan-DR-binding epitope peptide having the formula: aKXVAAWTLKAAa, where “X” is either cyclohexylalanine, phenylalanine, or tyrosine, and “a” is either D-alanine or L-alanine, has been found to bind to most HLA-DR alleles, and to stimulate the response of T helper lymphocytes from most individuals, regardless of their HLA type. An alternative of a pan-DR binding epitope comprises all “L” natural amino acids and can be provided in the form of nucleic acids that encode the epitope.

[0220] HTL peptide epitopes can also be modified to alter their biological properties. For example, they can be modified to include D-amino acids to increase their resistance to proteases and thus extend their serum half life, or they can be conjugated to other molecules such as lipids, proteins, carbohydrates, and the like to increase their biological activity. For example, a T helper peptide can be conjugated to one or more palmitic acid chains at either the amino or carboxyl termini.

[0221] IV.K.3. Combinations of CTL Peptides with T Cell Priming Agents

[0222] In some embodiments it may be desirable to include in the pharmaceutical compositions of the invention at least one component which primes cytotoxic T lymphocytes. Lipids have been identified as agents capable of priming CTL in vivo against viral antigens. For example, palmitic acid residues can be attached to the ε- and α-amino groups of a lysine residue and then linked, e.g., via one or more linking residues such as Gly, Gly-Gly-, Ser, Ser-Ser, or the like, to an immunogenic peptide. The lipidated peptide can then be administered either directly in a micelle or particle, incorporated into a liposome, or emulsified in an adjuvant, e.g., incomplete Freund's adjuvant. A preferred immunogenic composition comprises palmitic acid attached to ε- and α-amino groups of Lys, which is attached via linkage, e.g., Ser-Ser, to the amino terminus of the immunogenic peptide.

[0223] As another example of lipid priming of CTL responses, E. coli lipoproteins, such as tripalmitoyl-S-glycerylcysteinlyseryl-serine (P₃CSS) can be used to prime virus specific CTL when covalently attached to an appropriate peptide (see, e.g., Deres, et al., Nature 342:561, 1989). Peptides of the invention can be coupled to P₃CSS, for example, and the lipopeptide administered to an individual to specifically prime a CTL response to the target antigen. Moreover, because the induction of neutralizing antibodies can also be primed with P₃CSS-conjugated epitopes, two such compositions can be combined to more effectively elicit both humoral and cell-mediated responses.

[0224] CTL and/or HTL peptides can also be modified by the addition of amino acids to the termini of a peptide to provide for ease of linking peptides one to another, for coupling to a carrier support or larger peptide, for modifying the physical or chemical properties of the peptide or oligopeptide, or the like. Amino acids such as tyrosine, cysteine, lysine, glutamic or aspartic acid, or the like, can be introduced at the C- or N-terminus of the peptide or oligopeptide, particularly class I peptides. However, it is to be noted that modification at the carboxyl terminus of a CTL epitope may, in some cases, alter binding characteristics of the peptide. In addition, the peptide or oligopeptide sequences can differ from the natural sequence by being modified by terminal-NH₂ acylation, e.g., by alkanoyl (C₁-C₂₀) or thioglycolyl acetylation, terminal-carboxyl amidation, e.g., ammonia, methylamine, etc. In some instances these modifications may provide sites for linking to a support or other molecule.

[0225] IV.K.4. Vaccine Compositions Comprising DC Pulsed with CTL and/or HTL Peptides

[0226] An embodiment of a vaccine composition in accordance with the invention comprises ex vivo administration of a cocktail of epitope-bearing peptides to PBMC, or isolated DC therefrom, from the patient's blood. A pharmaceutical to facilitate harvesting of DC can be used, such as Progenipoietin™ (Monsanto, St. Louis, Mo.) or GM-CSF/IL-4. After pulsing the DC with peptides and prior to reinfusion into patients, the DC are washed to remove unbound peptides. In this embodiment, a vaccine comprises peptide-pulsed DCs which present the pulsed peptide epitopes complexed with HLA molecules on their surfaces.

[0227] The DC can be pulsed ex vivo with a cocktail of peptides, some of which stimulate CTL response to one or more antigens of interest, e.g., CEA, p53, Her2/neu, MAGE, prostate cancer-associated antigens and the like. Optionally, a helper T cell peptide such as a PADRE™ family molecule, can be included to facilitate the CTL response.

[0228] IV.L. Administration of Vaccines for Therapeutic or Prophylactic Purposes

[0229] The peptides of the present invention and pharmaceutical and vaccine compositions of the invention are typically used therapeutically to treat cancer. Vaccine compositions containing the peptides of the invention are typically administered to a cancer patient who has a malignancy associated with expression of one or more tumor-associated antigens. Alternatively, vaccine compositions can be administered to an individual susceptible to, or otherwise at risk for developing a particular type of cancer, e.g., breast cancer.

[0230] In therapeutic applications, peptide and/or nucleic acid compositions are administered to a patient in an amount sufficient to elicit an effective CTL and/or HTL response to the tumor antigen and to cure or at least partially arrest or slow symptoms and/or complications. An amount adequate to accomplish this is defined as “therapeutically effective dose.” Amounts effective for this use will depend on, e.g., the particular composition administered, the manner of administration, the stage and severity of the disease being treated, the weight and general state of health of the patient, and the judgment of the prescribing physician.

[0231] As noted above, peptides comprising CTL and/or HTL epitopes of the invention induce immune responses when presented by HLA molecules and contacted with a CTL or HTL specific for an epitope comprised by the peptide. The manner in which the peptide is contacted with the CTL or HTL is not critical to the invention. For instance, the peptide can be contacted with the CTL or HTL either in vivo or in vitro. If the contacting occurs in vivo, the peptide itself can be administered to the patient, or other vehicles, e.g., DNA vectors encoding one or more peptides, viral vectors encoding the peptide(s), liposomes and the like, can be used, as described herein.

[0232] When the peptide is contacted in vitro, the vaccinating agent can comprise a population of cells, e.g., peptide-pulsed dendritic cells, or TAA-specific CTLs, which have been induced by pulsing antigen-presenting cells in vitro with the peptide. Such a cell population is subsequently administered to a patient in a therapeutically effective dose.

[0233] For pharmaceutical compositions, the immunogenic peptides of the invention, or DNA encoding them, are generally administered to an individual already diagnosed with cancer. The peptides or DNA encoding them can be administered individually or as fusions of one or more peptide sequences.

[0234] For therapeutic use, administration should generally begin at the first diagnosis of cancer. This is followed by boosting doses until at least symptoms are substantially abated and for a period thereafter. The embodiment of the vaccine composition (i.e., including, but not limited to embodiments such as peptide cocktails, polyepitopic polypeptides, minigenes, or TAA-specific CTLs) delivered to the patient may vary according to the stage of the disease. For example, a vaccine comprising TAA-specific CTLs may be more efficacious in killing tumor cells in patients with advanced disease than alternative embodiments.

[0235] The vaccine compositions of the invention may also be used therapeutically in combination with treatments such as surgery. An example is a situation in which a patient has undergone surgery to remove a primary tumor and the vaccine is then used to slow or prevent recurrence and/or metastasis.

[0236] Where susceptible individuals, e.g., individuals who may be diagnosed as being genetically pre-disposed to developing a particular type of tumor, for example breast cancer, are identified prior to diagnosis of cancer, the composition can be targeted to them, thus minimizing the need for administration to a larger population.

[0237] The dosage for an initial immunization generally occurs in a unit dosage range where the lower value is about 1, 5, 50, 500, or 1,000 μg and the higher value is about 10,000; 20,000; 30,000; or 50,000 μg. Dosage values for a human typically range from about 500 μg to about 50,000 μg per 70 kilogram patient. Boosting dosages of between about 1.0 μg to about 50,000 μg of peptide pursuant to a boosting regimen over weeks to months may be administered depending upon the patient's response and condition as determined by measuring the specific activity of CTL and HTL obtained from the patient's blood.

[0238] Administration should continue until at least clinical symptoms or laboratory tests indicate that the tumor has been eliminated or that the tumor cell burden has been substantially reduced and for a period thereafter. The dosages, routes of administration, and dose schedules are adjusted in accordance with methodologies known in the art.

[0239] In certain embodiments, peptides and compositions of the present invention are employed in serious disease states, that is, life-threatening or potentially life threatening situations. In such cases, as a result of the minimal amounts of extraneous substances and the relative nontoxic nature of the peptides in preferred compositions of the invention, it is possible and may be felt desirable by the treating physician to administer substantial excesses of these peptide compositions relative to these stated dosage amounts.

[0240] The pharmaceutical compositions for therapeutic treatment are intended for parenteral, topical, oral, intrathecal, or local administration. Preferably, the pharmaceutical compositions are administered parentally, e.g., intravenously, subcutaneously, intradermally, or intramuscularly. Thus, the invention provides compositions for parenteral administration which comprise a solution of the immunogenic peptides dissolved or suspended in an acceptable carrier, preferably an aqueous carrier. A variety of aqueous carriers may be used, e.g., water, buffered water, 0.8% saline, 0.3% glycine, hyaluronic acid and the like. These compositions may be sterilized by conventional, well known sterilization techniques, or may be sterile filtered. The resulting aqueous solutions may be packaged for use as is, or lyophilized, the lyophilized preparation being combined with a sterile solution prior to administration. The compositions may contain pharmaceutically acceptable auxiliary substances as required to approximate physiological conditions, such as pH-adjusting and buffering agents, tonicity adjusting agents, wetting agents, preservatives, and the like, for example, sodium acetate, sodium lactate, sodium chloride, potassium chloride, calcium chloride, sorbitan monolaurate, triethanolamine oleate, etc.

[0241] The concentration of peptides of the invention in the pharmaceutical formulations can vary widely, i.e., from less than about 0.1%, usually at or at least about 2% to as much as 20% to 50% or more by weight, and will be selected primarily by fluid volumes, viscosities, etc., in accordance with the particular mode of administration selected.

[0242] A human unit dose form of the peptide composition is typically included in a pharmaceutical composition that comprises a human unit dose of an acceptable carrier, preferably an aqueous carrier, and is administered in a volume of fluid that is known by those of skill in the art to be used for administration of such compositions to humans (see, e.g., Remington's Pharmaceutical Sciences, 17^{th} Edition, A. Gennaro, Editor, Mack Publishing Co., Easton, Pa., 1985).

[0243] The peptides of the invention may also be administered via liposomes, which serve to target the peptides to a particular tissue, such as lymphoid tissue, or to target selectively to infected cells, as well as to increase the half-life of the peptide composition. Liposomes include emulsions, foams, miceiles, insoluble monolayers, liquid crystals, phospholipid dispersions, lamellar layers and the like. In these preparations, the peptide to be delivered is incorporated as part of a liposome, alone or in conjunction with a molecule which binds to a receptor prevalent among lymphoid cells, such as monoclonal antibodies which bind to the CD45 antigen, or with other therapeutic or immunogenic compositions. Thus, liposomes either filled or decorated with a desired peptide of the invention can be directed to the site of lymphoid cells, where the liposomes then deliver the peptide compositions. Liposomes for use in accordance with the invention are formed from standard vesicle-forming lipids, which generally include neutral and negatively charged phospholipids and a sterol, such as cholesterol. The selection of lipids is generally guided by consideration of, e.g., liposome size, acid lability and stability of the liposomes in the blood stream. A variety of methods are available for preparing liposomes, as described in, e.g., Szoka, et al., Ann. Rev. Biophys. Bioeng. 9:467 (1980), and U.S. Pat. Nos. 4,235,871, 4,501,728, 4,837,028, and 5,019,369.

[0244] For targeting cells of the immune system, a ligand to be incorporated into the liposome can include, e.g., antibodies or fragments thereof specific for cell surface determinants of the desired immune system cells. A liposome suspension containing a peptide may be administered intravenously, locally, topically, etc. in a dose which varies according to, inter alia, the manner of administration, the peptide being delivered, and the stage of the disease being treated.

[0245] For solid compositions, conventional nontoxic solid carriers may be used which include, for example, pharmaceutical grades of mannitol, lactose, starch, magnesium stearate, sodium saccharin, talcum, cellulose, glucose, sucrose, magnesium carbonate, and the like. For oral administration, a pharmaceutically acceptable nontoxic composition is formed by incorporating any of the normally employed excipients, such as those carriers previously listed, and generally 10-95% of active ingredient, that is, one or more peptides of the invention, and more preferably at a concentration of 25%-75%.

[0246] For aerosol administration, the immunogenic peptides are preferably supplied in finely divided form along with a surfactant and propellant. Typical percentages of peptides are 0.01%-20% by weight, preferably 1%-10%. The surfactant must, of course, be nontoxic, and preferably soluble in the propellant. Representative of such agents are the esters or partial esters of fatty acids containing from 6 to 22 carbon atoms, such as caproic, octanoic, lauric, palmitic, stearic, linoleic, linolenic, olesteric and oleic acids with an aliphatic polyhydric alcohol or its cyclic anhydride. Mixed esters, such as mixed or natural glycerides may be employed. The surfactant may constitute 0.1%-20% by weight of the composition, preferably 0.25-5%. The balance of the composition is ordinarily propellant. A carrier can also be included, as desired, as with, e.g., lecithin for intranasal delivery.

### IV.M. HLA Expression: Implications for T Cell-Based Immunotherapy

[0247] Disease Progression in Cancer and Infectious Disease

[0248] It is well recognized that a dynamic interaction between exists between host and disease, both in the cancer and infectious disease settings. In the infectious disease setting, it is well established that pathogens evolve during disease. The strains that predominate early in HIV infection are different from the ones that are associated with AIDS and later disease stages (NS versus S strains). It has long been hypothesized that pathogen forms that are effective in establishing infection may differ from the ones most effective in terms of replication and chronicity.

[0249] Similarly, it is widely recognized that the pathological process by which an individual succumbs to a neoplastic disease is complex. During the course of disease, many changes occur in cancer cells. The tumor accumulates alterations which are in part related to dysfunctional regulation of growth and differentiation, but also related to maximizing its growth potential, escape from drug treatment and/or the body's immunosurveillance. Neoplastic disease results in the accumulation of several different biochemical alterations of cancer cells, as a function of disease progression. It also results in significant levels of intra- and inter-cancer heterogeneity, particularly in the late, metastatic stage.

[0250] Familiar examples of cellular alterations affecting treatment outcomes include the outgrowth of radiation or chemotherapy resistant tumors during the course of therapy. These examples parallel the emergence of drug resistant viral strains as a result of aggressive chemotherapy, e.g., of chronic HBV and HIV infection, and the current resurgence of drug resistant organisms that cause Tuberculosis and Malaria. It appears that significant heterogeneity of responses is also associated with other approaches to cancer therapy, including anti-angiogenesis drugs, passive antibody immunotherapy, and active T cell-based immunotherapy. Thus, in view of such phenomena, epitopes from multiple disease-related antigens can be used in vaccines and therapeutics thereby counteracting the ability of diseased cells to mutate and escape treatment.

[0251] The Interplay between Disease and the Immune System

[0252] One of the main factors contributing to the dynamic interplay between host and disease is the immune response mounted against the pathogen, infected cell, or malignant cell. In many conditions such immune responses control the disease. Several animal model systems and prospective studies of natural infection in humans suggest that immune responses against a pathogen can control the pathogen, prevent progression to severe disease and/or eliminate the pathogen. A common theme is the requirement for a multispecific T cell response, and that narrowly focused responses appear to be less effective. These observations guide skilled artisan as to embodiments of methods and compositions of the present invention that provide for a broad immune response.

[0253] In the cancer setting there are several findings that indicate that immune responses can impact neoplastic growth:

[0254] First, the demonstration in many different animal models, that anti-tumor T cells, restricted by MHC class I, can prevent or treat tumors.

[0255] Second, encouraging results have come from immunotherapy trials.

[0256] Third, observations made in the course of natural disease correlated the type and composition of T cell infiltrate within tumors with positive clinical outcomes (Coulie P G, et al. Antitumor immunity at work in a melanoma patient In Advances in Cancer Research, 213-242, 1999).

[0257] Finally, tumors commonly have the ability to mutate, thereby changing their immunological recognition. For example, the presence of monospecific CTL was also correlated with control of tumor growth, until antigen loss emerged (Riker A, et al., Immune selection after antigen-specific immunotherapy of melanoma Surgery, August: 126(2):112-20, 1999; Marchand M, et al., Tumor regressions observed in patients with metastatic melanoma treated with an antigenic peptide encoded by gene MAGE-3 and presented by HLA-A1 Int. J. Cancer 80(2):219-30, Jan. 18, 1999). Similarly, loss of beta 2 microglobulin was detected in 5/13 lines established from melanoma patients after receiving immunotherapy at the NCI (Restifo N P, et al., Loss of functional Beta2 -microglobulin in metastatic melanomas from five patients receiving immunotherapy Journal of the National Cancer Institute, Vol. 88 (2), 100-108, January. 1996). It has long been recognized that HLA class I is frequently altered in various tumor types. This has led to a hypothesis that this phenomenon might reflect immune pressure exerted on the tumor by means of class I restricted CTL. The extent and degree of alteration in HLA class I expression appears to be reflective of past immune pressures, and may also have prognostic value (van Duinen S G, et al., Level of HLA antigens in locoregional metastases and clinical course of the disease in patients with melanoma Cancer Research 48, 1019-1025, February 1988; Möller P, et al., Influence of major histocompatibility complex class I and II antigens on survival in colorectal carcinoma Cancer Research 51, 729-736, January 1991). Taken together, these observations provide a rationale for immunotherapy of cancer and infectious disease, and suggest that effective strategies need to account for the complex series of pathological changes associated with disease.

[0258] The Three Main Types of Alterations in HLA Expression in Tumors and Their Functional Significance

[0259] The level and pattern of expression of HLA class I antigens in tumors has been studied in many different tumor types and alterations have been reported in all types of tumors studied. The molecular mechanisms underlining HLA class I alterations have been demonstrated to be quite heterogeneous. They include alterations in the TAP/processing pathways, mutations of β-microglobulin and specific HLA heavy chains, alterations in the regulatory elements controlling over class I expression and loss of entire chromosome sections. There are several reviews on this topic, see, e.g.,: Garrido F, et al., Natural history of HLA expression during tumour development Immunol Today 14(10):491-499, 1993; Kaklamanis L, et al., Loss of HLA class-I alleles, heavy chains and 62-microglobulin in colorectal cancer Int. J. Cancer, 51(3):379-85, May 28, 1992. There are three main types of HLA Class I alteration (complete loss, allele-specific loss and decreased expression). The functional significance of each alteration is discussed separately:

[0260] Complete Loss of HLA Expression

[0261] Complete loss of HLA expression can result from a variety of different molecular mechanisms, reviewed in (Algarra I, et al., The HLA crossroad in tumor immunology Human Immunology 61, 65-73, 2000; Browning M, et al., Mechanisms of loss of HLA class I expression on colorectal tumor cells Tissue Antigens 47:364-371, 1996; Ferrone S, et al., Loss of HLA class I antigens by melanoma cells: molecular mechanisms, functional significance and clinical relevance Immunology Today, 16(10): 487-494, 1995; Garrido F, et al., Natural history of HLA expression during tumour development Immunology Today 14(10):491-499, 1993; Tait, B D, HLA Class I expression on human cancer cells: Implications for effective immunotherapy Hum Immunol. 61, 158-165, 2000). In functional terms, this type of alteration has several important implications.

[0262] While the complete absence of class I expression will eliminate CTL recognition of those tumor cells, the loss of HLA class I will also render the tumor cells extraordinary sensitive to lysis from NK cells (Ohnmacht, Ga., et al., Heterogeneity in expression of human leukocyte antigens and melanoma-associated antigens in advanced melanoma J. Cellular Phys 182:332-338, 2000; Liunggren H G, et al., Host resistance directed selectively against H-2 deficient lymphoma variants: Analysis of the mechanism J. Exp. Med., December 1;162(6):1745-59, 1985; Maio M, et al., Reduction in susceptibility to natural killer cell-mediated lysis of human FO-1 melanoma cells after induction of HLA class I antigen expression by transfection with B2m gene J. Clin. Invest. 88(1):282-9, July 1991; Schrier P I, et al., Relationship between myc oncogene activation and MHC class I expression Adv. Cancer Res., 60:181-246, 1993).

[0263] The complementary interplay between loss of HLA expression and gain in NK sensitivity is exemplified by the classic studies of Coulie and coworkers (Coulie, P G, et al., Antitumor immunity at work in a melanoma patient. In Advances in Cancer Research, 213-242, 1999) which described the evolution of a patient's immune response over the course of several years. Because of increased sensitivity to NK lysis, it is predicted that approaches leading to stimulation of innate immunity in general and NK activity in particular would be of special significance. An example of such approach is the induction of large amounts of dendritic cells (DC) by various hematopoietic growth factors, such as Flt3 ligand or ProGP. The rationale for this approach resides in the well known fact that dendritic cells produce large amounts of IL-12, one of the most potent stimulators for innate immunity and NK activity in particular. Alternatively, IL-12 is administered directly, or as nucleic acids that encode it. In this light, it is interesting to note that Flt3 ligand treatment results in transient tumor regression of a class I negative prostate murine cancer model (Ciavarra R P, et al., Flt3-Ligand induces transient tumor regression in an ectopic treatment model of major histocompatibility complex-negative prostate cancer Cancer Res 60:2081-84, 2000). In this context, specific anti-tumor vaccines in accordance with the invention synergize with these types of hematopoietic growth factors to facilitate both CTL and NK cell responses, thereby appreciably impairing a cell's ability to mutate and thereby escape efficacious treatment. Thus, an embodiment of the present invention comprises a composition of the invention together with a method or composition that augments functional activity or numbers of NK cells. Such an embodiment can comprise a protocol that provides a composition of the invention sequentially with an NK-inducing modality, or contemporaneous with an NK-inducing modality.

[0264] Secondly, complete loss of HLA frequently occurs only in a fraction of the tumor cells, while the remainder of tumor cells continue to exhibit normal expression. In functional terms, the tumor would still be subject, in part, to direct attack from a CTL response; the portion of cells lacking HLA subject to an NK response. Even if only a CTL response were used, destruction of the HLA expressing fraction of the tumor has dramatic effects on survival times and quality of life.

[0265] It should also be noted that in the case of heterogeneous HLA expression, both normal HLA-expressing as well as defective cells are predicted to be susceptible to immune destruction based on “bystander effects.” Such effects were demonstrated, e.g., in the studies of Rosendahl and colleagues that investigated in vivo mechanisms of action of antibody targeted superantigens (Rosendahl A, et al., Perforin and IFN-gamma are involved in the antitumor effects of antibody-targeted superantigens J. Immunol. 160(11):5309-13, Jun. 1, 1998). The bystander effect is understood to be mediated by cytokines elicited from, e.g., CTLs acting on an HLA-bearing target cell, whereby the cytokines are in the environment of other diseased cells that are concomitantly killed.

[0266] Allele-Specific Loss

[0267] One of the most common types of alterations in class I molecules is the selective loss of certain alleles in individuals heterozygous for HLA. Allele-specific alterations might reflect the tumor adaptation to immune pressure, exerted by an immunodominant response restricted by a single HLA restriction element. This type of alteration allows the tumor to retain class I expression and thus escape NK cell recognition, yet still be susceptible to a CTL-based vaccine in accordance with the invention which comprises epitopes corresponding to the remaining HLA type. Thus, a practical solution to overcome the potential hurdle of allele-specific loss relies on the induction of multispecific responses. Just as the inclusion of multiple disease-associated antigens in a vaccine of the invention guards against mutations that yield loss of a specific disease antigens, simultaneously targeting multiple HLA specificities and multiple disease-related antigens prevents disease escape by allele-specific losses.

[0268] Decrease in Expression (Allele-Specific or Not)

[0269] The sensitivity of effector CTL has long been demonstrated (Brower, R C, et al., Minimal requirements for peptide mediated activation of CD8+ CTL Mol. Immunol., 31;1285-93, 1994; Chriustnick, E T, et al. Low numbers of MHC class I-peptide complexes required to trigger a T cell response Nature 352:67-70, 1991; Sykulev, Y, et al., Evidence that a single peptide-MHC complex on a target cell can elicit a cytolytic T cell response Immunity, 4(6):565-71, June 1996). Even a single peptide/MHC complex can result in tumor cells lysis and release of anti-tumor lymphokines. The biological significance of decreased HLA expression and possible tumor escape from immune recognition is not fully known. Nevertheless, it has been demonstrated that CTL recognition of as few as one MHC/peptide complex is sufficient to lead to tumor cell lysis.

[0270] Further, it is commonly observed that expression of HLA can be upregulated by gamma IFN, commonly secreted by effector CTL. Additionally, HLA class I expression can be induced in vivo by both alpha and beta IFN (Halloran, et al. Local T cell responses induce widespread MHC expression. J. Immunol 148:3837, 1992; Pestka, S, et al., Interferons and their actions Annu. Rev. Biochem. 56:727-77, 1987). Conversely, decreased levels of HLA class I expression also render cells more susceptible to NK lysis.

[0271] With regard to gamma IFN, Torres et al (Torres, M J, et al., Loss of an HLA haplotype in pancreas cancer tissue and its corresponding tumor derived cell line. Tissue Antigens 47:372-81, 1996) note that HLA expression is upregulated by gamma IFN in pancreatic cancer, unless a total loss of haplotype has occurred. Similarly, Rees and Mian note that allelic deletion and loss can be restored, at least partially, by cytokines such as IFN-gamma (Rees, R., et al. Selective MHC expression in tumours modulates adaptive and innate antitumour responses Cancer Immunol Immunother 48:374-81, 1999). It has also been noted that IFN-gamma treatment results in upregulation of class I molecules in the majority of the cases studied (Browning M, et al., Mechanisms of loss of HLA class I expression on colorectal tumor cells. Tissue Antigens 47:364-71, 1996). Kaklamakis, et al. also suggested that adjuvant immunotherapy with IFN-gamma may be beneficial in the case of HLA class I negative tumors (Kaklamanis L, Loss of transporter in antigen processing 1 transport protein and major histocompatibility complex class I molecules in metastatic versus primary breast cancer. Cancer Research 55:5191-94, November 1995). It is important to underline that IFN-gamma production is induced and self-amplified by local inflammation/immunization (Halloran, et al. Local T cell responses induce widespread MHC expression J. Immunol 148:3837, 1992), resulting in large increases in MHC expressions even in sites distant from the inflammatory site.

[0272] Finally, studies have demonstrated that decreased HLA expression can render tumor cells more susceptible to NK lysis (Ohnmacht, Ga., et al., Heterogeneity in expression of human leukocyte antigens and melanoma-associated antigens in advanced melanoma J Cellular Phys 182:332-38, 2000; Liunggren H G, et al., Host resistance directed selectively against H-2 deficient lymphoma variants: Analysis of the mechanism J. Exp. Med., 162(6):1745-59, Dec. 1, 1985; Maio M, et al., Reduction in susceptibility to natural killer cell-mediated lysis of human FO-1 melanoma cells after induction of HLA class I antigen expression by transfection with β2m gene J. Clin. Invest. 88(1):282-9, July 1991; Schrier P I, et al., Relationship between myc oncogene activation and MHC class I expression Adv. Cancer Res., 60:181-246, 1993). If decreases in HLA expression benefit a tumor because it facilitates CTL escape, but render the tumor susceptible to NK lysis, then a minimal level of HLA expression that allows for resistance to NK activity would be selected for (Garrido F, et al., Implications for immunosurveillance of altered HLA class I phenotypes in human tumours Immunol Today 18(2):89-96, February 1997). Therefore, a therapeutic compositions or methods in accordance with the invention together with a treatment to upregulate HLA expression and/or treatment with high affinity T-cells renders the tumor sensitive to CTL destruction.

[0273] Frequency of Alterations in HLA Expression

[0274] The frequency of alterations in class I expression is the subject of numerous studies (Algarra I, et al., The HLA crossroad in tumor immunology Human Immunology 61, 65-73, 2000). Rees and Mian estimate allelic loss to occur overall in 3-20% of tumors, and allelic deletion to occur in 15-50% of tumors. It should be noted that each cell carries two separate sets of class I genes, each gene carrying one HLA-A and one HLA-B locus. Thus, fully heterozygous individuals carry two different HLA-A molecules and two different HLA-B molecules. Accordingly, the actual frequency of losses for any specific allele could be as little as one quarter of the overall frequency. They also note that, in general, a gradient of expression exists between normal cells, primary tumors and tumor metastasis. In a study from Natali and coworkers (Natali P G, et al., Selective changes in expression of HLA class I polymorphic determinants in human solid tumors PNAS USA 86:6719-6723, September 1989), solid tumors were investigated for total HLA expression, using W6/32 antibody, and for allele-specific expression of the A2 antigen, as evaluated by use of the BB7.2 antibody. Tumor samples were derived from primary cancers or metastasis, for 13 different tumor types, and scored as negative if less than 20%, reduced if in the 30-80% range, and normal above 80%. All tumors, both primary and metastatic, were HLA positive with W6/32. In terms of A2 expression, a reduction was noted in 16.1% of the cases, and A2 was scored as undetectable in 39.4% of the cases. Garrido and coworkers (Garrido F, et al., Natural history of HLA expression during tumour development Immunol Today 14(10):491-99, 1993) emphasize that HLA changes appear to occur at a particular step in the progression from benign to most aggressive. Jiminez et al (Jiminez P, et al., Microsatellite instability analysis in tumors with different mechanisms for total loss of HLA expression. Cancer Immunol Immunother 48:684-90, 2000) have analyzed 118 different tumors (68 colorectal, 34 laryngeal and 16 melanomas). The frequencies reported for total loss of HLA expression were 11% for colon, 18% for melanoma and 13% for larynx. Thus, HLA class I expression is altered in a significant fraction of the tumor types, possibly as a reflection of immune pressure, or simply a reflection of the accumulation of pathological changes and alterations in diseased cells.

[0275] Immunotherapy in the Context of HLA Loss

[0276] A majority of the tumors express HLA class I, with a general tendency for the more severe alterations to be found in later stage and less differentiated tumors. This pattern is encouraging in the context of immunotherapy, especially considering that: 1) the relatively low sensitivity of immunohistochemical techniques might underestimate HLA expression in tumors; 2) class I expression can be induced in tumor cells as a result of local inflammation and lymphokine release; and, 3) class I negative cells are sensitive to lysis by NK cells.

[0277] Accordingly, various embodiments of the present invention can be selected in view of the fact that there can be a degree of loss of HLA molecules, particularly in the context of neoplastic disease. For example, the treating physician can assay a patient's tumor to ascertain whether HLA is being expressed. If a percentage of tumor cells express no class I HLA, then embodiments of the present invention that comprise methods or compositions that elicit NK cell responses can be employed. As noted herein, such NK-inducing methods or composition can comprise a Flt3 ligand or ProGP which facilitate mobilization of dendritic cells, the rationale being that dendritic cells produce large amounts of IL-12. IL-12 can also be administered directly in either amino acid or nucleic acid form. It should be noted that compositions in accordance with the invention can be administered concurrently with NK cell-inducing compositions, or these compositions can be administered sequentially.

[0278] In the context of allele-specific HLA loss, a tumor retains class I expression and may thus escape NK cell recognition, yet still be susceptible to a CTL-based vaccine in accordance with the invention which comprises epitopes corresponding to the remaining HLA type. The concept here is analogous to embodiments of the invention that include multiple disease antigens to guard against mutations that yield loss of a specific antigen. Thus, one can simultaneously target multiple HLA specificities and epitopes from multiple disease-related antigens to prevent tumor escape by allele-specific loss as well as disease-related antigen loss. In addition, embodiments of the present invention can be combined with alternative therapeutic compositions and methods. Such alternative compositions and methods comprise, without limitation, radiation, cytotoxic pharmaceuticals, and/or compositions/methods that induce humoral antibody responses.

[0279] Moreover, it has been observed that expression of HLA can be upregulated by gamma IFN, which is commonly secreted by effector CTL, and that HLA class I expression can be induced in vivo by both alpha and beta IFN. Thus, embodiments of the invention can also comprise alpha, beta and/or gamma IFN to facilitate upregualtion of HLA.

### IV.N. Reprieve Periods from Therapies that Induce Side Effects

[0280] “Scheduled Treatment Interruptions or Drug Holidays”

[0281] Recent evidence has shown that certain patients infected with a pathogen, whom are initially treated with a therapeutic regimen to reduce pathogen load, have been able to maintain decreased pathogen load when removed from the therapeutic regimen, i.e., during a “drug holiday” (Rosenberg, E., et al., Immune control of HIV-1 after early treatment of acute infection Nature 407:523-26, Sept. 28, 2000) As appreciated by those skilled in the art, many therapeutic regimens for both pathogens and cancer have numerous, often severe, side effects. During the drug holiday, the patient's immune system keeps the disease in check. Methods for using compositions of the invention are used in the context of drug holidays for cancer and pathogenic infection.

[0282] For treatment of an infection, where therapies are not particularly immunosuppressive, compositions of the invention are administered concurrently with the standard therapy. During this period, the patient's immune system is directed to induce responses against the epitopes comprised by the present inventive compositions. Upon removal from the treatment having side effects, the patient is primed to respond to the infectious pathogen should the pathogen load begin to increase. Composition of the invention can be provided during the drug holiday as well.

[0283] For patients with cancer, many therapies are immunosuppressive. Thus, upon achievement of a remission or identification that the patient is refractory to standard treatment, then upon removal from the immunosuppressive therapy, a composition in accordance with the invention is administered. Accordingly, as the patient's immune system reconstitutes, precious immune resources are simultaneously directed against the cancer. Composition of the invention can also be administered concurrently with an immunosuppressive regimen if desired.

### IV.O. Kits

[0284] The peptide and nucleic acid compositions of this invention can be provided in kit form together with instructions for vaccine administration. Typically the kit would include desired peptide compositions in a container, preferably in unit dosage form and instructions for administration. An alternative kit would include a minigene construct with desired nucleic acids of the invention in a container, preferably in unit dosage form together with instructions for administration. Lymphokines such as IL-2 or IL-12 may also be included in the kit. Other kit components that may also be desirable include, for example, a sterile syringe, booster dosages, and other desired excipients.

### IV.P. Overview

[0285] Epitopes in accordance with the present invention were successfully used to induce an immune response. Immune responses with these epitopes have been induced by administering the epitopes in various forms. The epitopes have been administered as peptides, as nucleic acids, and as viral vectors comprising nucleic acids that encode the epitope(s) of the invention. Upon administration of peptide-based epitope forms, immune responses have been induced by direct loading of an epitope onto an empty HLA molecule that is expressed on a cell, and via internalization of the epitope and processing via the HLA class I pathway; in either event, the HLA molecule expressing the epitope was then able to interact with and induce a CTL response. Peptides can be delivered directly or using such agents as liposomes. They can additionally be delivered using ballistic delivery, in which the peptides are typically in a crystalline form. When DNA is used to induce an immune response, it is administered either as naked DNA, generally in a dose range of approximately 1-5 mg, or via the ballistic “gene gun” delivery, typically in a dose range of approximately 10-100 μg. The DNA can be delivered in a variety of conformations, e.g., linear, circular etc. Various viral vectors have also successfully been used that comprise nucleic acids which encode epitopes in accordance with the invention.

[0286] Accordingly compositions in accordance with the invention exist in several forms. Embodiments of each of these composition forms in accordance with the invention have been successfully used to induce an immune response.

[0287] One composition in accordance with the invention comprises a plurality of peptides. This plurality or cocktail of peptides is generally admixed with one or more pharmaceutically acceptable excipients. The peptide cocktail can comprise multiple copies of the same peptide or can comprise a mixture of peptides. The peptides can be analogs of naturally occurring epitopes. The peptides can comprise artificial amino acids and/or chemical modifications such as addition of a surface active molecule, e.g., lipidation; acetylation, glycosylation, biotinylation, phosphorylation etc. The peptides can be CTL or HTL epitopes. In a preferred embodiment the peptide cocktail comprises a plurality of different CTL epitopes and at least one HTL epitope. The HTL epitope can be naturally or non-naturally (e.g., PADRE®, Epimmune Inc., San Diego, Calif.). The number of distinct epitopes in an embodiment of the invention is generally a whole unit integer from one through two hundred (e.g., 1, 2, 3, 4, 5, 6, 7, 8, 9, 10, 11, 12, 13, 14, 15, 16, 17, 18, 19, 20, 21, 22, 23, 24, 25, 26, 27, 28, 29, 30, 31, 32, 33, 34, 35, 36, 37, 38, 39, 40, 41, 42, 43, 44, 45, 46, 47, 48, 49, 50, 51, 52, 53, 54, 55, 56, 57, 58, 59, 60, 61, 62, 63, 64, 65, 66, 67, 68, 69, 70, 71, 72, 73, 74, 75, 76, 77, 78, 79, 80, 81, 82, 83, 84, 85, 86, 87, 88, 89, 90, 91, 92, 93, 94, 95, 96, 97, 98, 99, 100, 101, 102, 103, 104, 105, 105, 107, 108, 109, 110, 111, 112, 113, 114, 115, 116, 117, 118, 119, 120, 121, 122, 123, 124, 125, 126, 127, 128, 129, 130, 131, 132, 133, 134, 135, 136, 137, 138, 139, 140, 141, 142, 143, 144, 145, 146, 147, 148, 149, 150, 151, 152, 153, 154, 155, 156, 157, 158, 159, 160, 161, 162, 163, 164, 165, 166, 167, 168, 169, 170, 171, 172, 173, 174, 175, 176, 177, 178, 179, 180, 181, 182, 183, 184, 185, 186, 187, 188, 189, 190, 191, 192, 193, 194, 195, 196, 197, 198, 199, 200).

[0288] An additional embodiment of a composition in accordance with the invention comprises a polypeptide multi-epitope construct, i.e., a polyepitopic peptide. Polyepitopic peptides in accordance with the invention are prepared by use of technologies well-known in the art. By use of these known technologies, epitopes in accordance with the invention are connected one to another. The polyepitopic peptides can be linear or non-linear, e.g., multivalent. These polyepitopic constructs can comprise artificial amino acids, spacing or spacer amino acids, flanking amino acids, or chemical modifications between adjacent epitope units. The polyepitopic construct can be a heteropolymer or a homopolymer. The polyepitopic constructs generally comprise epitopes in a quantity of any whole unit integer between 2-150 (e.g., 2, 3, 4, 5, 6, 7, 8, 9, 10, 11, 12, 13, 14, 15, 16, 17, 18, 19, 20, 21, 22, 23, 24, 25, 26, 27, 28, 29, 30, 31, 32, 33, 34, 35, 36, 37, 38, 39, 40, 41, 42, 43, 44, 45, 46, 47, 48, 49, 50, 51, 52, 53, 54, 55, 56, 57, 58, 59, 60, 61, 62, 63, 64, 65, 66, 67, 68, 69, 70, 71, 72, 73, 74, 75, 76, 77, 78, 79, 80, 81, 82, 83, 84, 85, 86, 87, 88, 89, 90, 91, 92, 93, 94, 95, 96, 97, 98, 99, or, 100). The polyepitopic construct can comprise CTL and/or HTL epitopes. One or more of the epitopes in the construct can be modified, e.g., by addition of a surface active material, e.g. a lipid, or chemically modified, e.g., acetylation, etc. Moreover, bonds in the multiepitopic construct can be other than peptide bonds, e.g., covalent bonds, ester or ether bonds, disulfide bonds, hydrogen bonds, ionic bonds etc.

[0289] Alternatively, a composition in accordance with the invention comprises construct which comprises a series, sequence, stretch, etc., of amino acids that have homology to (i.e., corresponds to or is contiguous with) to a native sequence. This stretch of amino acids comprises at least one subsequence of amino acids that, if cleaved or isolated from the longer series of amino acids, functions as an HLA class I or HLA class II epitope in accordance with the invention. In this embodiment, the peptide sequence is modified, so as to become a construct as defined herein, by use of any number of techniques known or to be provided in the art. The polyepitopic constructs can contain homology to a native sequence in any whole unit integer increment from 70-100%, e.g., 70, 71, 72, 73, 74, 75, 76, 77, 78, 79, 80, 81, 82, 83, 84, 85, 86, 87, 88, 89, 90, 91, 92, 93, 94, 95, 96, 97, 98, 99, or, 100 percent.

[0290] A further embodiment of a composition in accordance with the invention is an antigen presenting cell that comprises one or more epitopes in accordance with the invention. The antigen presenting cell can be a “professional” antigen presenting cell, such as a dendritic cell. The antigen presenting cell can comprise the epitope of the invention by any means known or to be determined in the art. Such means include pulsing of dendritic cells with one or more individual epitopes or with one or more peptides that comprise multiple epitopes, by nucleic acid administration such as ballistic nucleic acid delivery or by other techniques in the art for administration of nucleic acids, including vector-based, e.g. viral vector, delivery of nucleic acids.

[0291] Further embodiments of compositions in accordance with the invention comprise nucleic acids that encode one or more peptides of the invention, or nucleic acids which encode a polyepitopic peptide in accordance with the invention. As appreciated by one of ordinary skill in the art, various nucleic acids compositions will encode the same peptide due to the redundancy of the genetic code. Each of these nucleic acid compositions falls within the scope of the present invention. This embodiment of the invention comprises DNA or RNA, and in certain embodiments a combination of DNA and RNA. It is to be appreciated that any composition comprising nucleic acids that will encode a peptide in accordance with the invention or any other peptide based composition in accordance with the invention, falls within the scope of this invention.

[0292] It is to be appreciated that peptide-based forms of the invention (as well as the nucleic acids that encode them) can comprise analogs of epitopes of the invention generated using priniciples already known, or to be known, in the art. Principles related to analoging are now known in the art, and are disclosed herein; moreover, analoging principles (heteroclitic analoging) are disclosed in co-pending application serial number U.S. Ser. No. 09/226,775 filed 6 Jan. 1999. Generally the compositions of the invention are isolated or purified.

[0293] The invention will be described in greater detail by way of specific examples. The following examples are offered for illustrative purposes, and are not intended to limit the invention in any manner. Those of skill in the art will readily recognize a variety of non-critical parameters that can be changed or modified to yield alternative embodiments in accordance with the invention.

### V. EXAMPLES

[0294] The following examples illustrate identification, selection, and use of immunogenic Class I and Class II peptide epitopes for inclusion in vaccine compositions.

### Example 1

[0295] HLA Class I and Class II Binding Assays

[0296] The following example of peptide binding to HLA molecules demonstrates quantification of binding affinities of HLA class I and class II peptides. Binding assays can be performed with peptides that are either motif-bearing or not motif-bearing.

[0297] HLA class I and class II binding assays using purified HLA molecules were performed in accordance with disclosed protocols (e.g., PCT publications WO 94/20127 and WO 94/03205; Sidney et al., Current Protocols in Immunology 18.3.1 (1998); Sidney, et al., J. Immunol. 154:247 (1995); Sette, et al., Mol. Immunol. 31:813 (1994)). Briefly, purified MHC molecules (5 to 500 nM) were incubated with various unlabeled peptide inhibitors and 1-10 nM ¹²⁵I-radiolabeled probe peptides as described. Following incubation, MHC-peptide complexes were separated from free peptide by gel filtration and the fraction of peptide bound was determined. Typically, in preliminary experiments, each MHC preparation was titered in the presence of fixed amounts of radiolabeled peptides to determine the concentration of HLA molecules necessary to bind 10-20% of the total radioactivity. All subsequent inhibition and direct binding assays were performed using these HLA concentrations.

[0298] Since under these conditions [label]<[HLA] and IC₅₀≧[HLA], the measured IC₅₀ values are reasonable approximations of the true K_{D} values. Peptide inhibitors are typically tested at concentrations ranging from 120 μg/ml to 1.2 ng/ml, and are tested in two to four completely independent experiments. To allow comparison of the data obtained in different experiments, a relative binding figure is calculated for each peptide by dividing the IC₅₀ of a positive control for inhibition by the IC₅₀ for each tested peptide (typically unlabeled versions of the radiolabeled probe peptide). For database purposes, and inter-experiment comparisons, relative binding values are compiled. These values can subsequently be converted back into IC₅₀ nM values by dividing the IC₅₀ nM of the positive controls for inhibition by the relative binding of the peptide of interest. This method of data compilation has proven to be the most accurate and consistent for comparing peptides that have been tested on different days, or with different lots of purified MHC.

[0299] Binding assays as outlined above can be used to analyze supermotif and/or motif-bearing epitopes as, for example, described in Example 2.

### Example 2

[0300] Identification of HLA Supermotif- and Motif-Bearing CTL Candidate Epitopes

[0301] Vaccine compositions of the invention may include multiple epitopes that comprise multiple HLA supermotifs or motifs to achieve broad population coverage. This example illustrates the identification of supermotif- and motif-bearing epitopes for the inclusion in such a vaccine composition. Calculation of population coverage is performed using the strategy described below.

[0302] Computer Searches and Algorthims for Identification of Supermotif and/or Motif-Bearing Epitopes

[0303] The searches performed to identify the motif-bearing peptide sequences in Examples 2 and 5 employed protein sequence data for the tumor-associated antigen HER2/neu.

[0304] Computer searches for epitopes bearing HLA Class I or Class II supermotifs or motifs were performed as follows. All translated protein sequences were analyzed using a text string search software program, e.g., MotifSearch 1.4 (D. Brown, San Diego) to identify potential peptide sequences containing appropriate HLA binding motifs; alternative programs are readily produced in accordance with information in the art in view of the motif/supermotif disclosure herein. Furthermore, such calculations can be made mentally. Identified A2-, A3-, and DR-supermotif sequences were scored using polynomial algorithms to predict their capacity to bind to specific HLA-Class I or Class II molecules. These polynomial algorithms take into account both extended and refined motifs (that is, to account for the impact of different amino acids at different positions), and are essentially based on the premise that the overall affinity (or ΔG) of peptide-HLA molecule interactions can be approximated as a linear polynomial function of the type:

“ΔG”=a₁ᵢ×a₂ᵢ×a₃ᵢ . . . ×aₙᵢ

[0305] where aⱼᵢ is a coefficient which represents the effect of the presence of a given amino acid (j) at a given position (i) along the sequence of a peptide of n amino acids. The crucial assumption of this method is that the effects at each position are essentially independent of each other (i.e., independent binding of individual side-chains). When residue j occurs at position i in the peptide, it is assumed to contribute a constant amount jᵢ to the free energy of binding of the peptide irrespective of the sequence of the rest of the peptide. This assumption is justified by studies from our laboratories that demonstrated that peptides are bound to MHC and recognized by T cells in essentially an extended conformation (data omitted herein).

[0306] The method of derivation of specific algorithm coefficients has been described in Gulukota et al., J. Mol. Biol. 267:1258-126, 1997; (see also Sidney et al., Human Immunol. 45:79-93, 1996; and Southwood et al., J. Immunol. 160:3363-3373, 1998). Briefly, for all i positions, anchor and non-anchor alike, the geometric mean of the average relative binding (ARB) of all peptides carrying j is calculated relative to the remainder of the group, and used as the estimate of jᵢ. For Class II peptides, if multiple alignments are possible, only the highest scoring alignment is utilized, following an iterative procedure. To calculate an algorithm score of a given peptide in a test set, the ARB values corresponding to the sequence of the peptide are multiplied. If this product exceeds a chosen threshold, the peptide is predicted to bind. Appropriate thresholds are chosen as a function of the degree of stringency of prediction desired.

[0307] Selection of HLA-A2 Supertype Cross-Reactive Peptides

[0308] The complete protein sequence from HER2/neu was scanned, utilizing motif identification software, to identify 8-, 9-, 10-, and 11-mer sequences containing the HLA-A2-supermotif main anchor specificity.

[0309] A total of 623 HLA-A2 supermotif-positive sequences were identified. Of these, 73 scored positive in the A2 algorithm and the peptides corresponding to the sequences were then synthesized. An additional 90 A2 supermotif-bearing nonamers and decamers were also synthesized. These 163 peptides were then tested for their capacity to bind purified HLA-A*0201 molecules in vitro (HLA-A*0201 is considered a prototype A2 supertype molecule). Twenty of the peptides bound A*0201 with IC₅₀ values ≦500 nM.

[0310] The twenty A*0201-binding peptides were subsequently tested for the capacity to bind to additional A2-supertype molecules (A*0202, A*0203, A*0206, and A*6802). As shown in Table XXII, 9 of the 20 peptides were found to be A2-supertype cross-reactive binders, binding at least three of the five A2-supertype alleles tested.

[0311] Selection of HLA-A3 Supermotif-Bearing Epitopes

[0312] The protein sequences scanned above are also examined for the presence of peptides with the HLA-A3-supermotif primary anchors using methodology similar to that performed to identify HLA-A2 supermotif-bearing epitopes.

[0313] Peptides corresponding to the supermotif-bearing sequences are then synthesized and tested for binding to HLA-A*0301 and HLA-A*1101 molecules, the two most prevalent A3-supertype alleles. The peptides that are found to bind one of the two alleles with binding affinities of ≦500 nM are then tested for binding cross-reactivity to the other common A3-supertype alleles (A*3101, A*3301, and A*6801) to identify those that can bind at least three of the five HLA-A3-supertype molecules tested. Examples of HLA-A3 cross-binding supermotif-bearing peptides identified in accordance with this procedure are provided in Table XXIII.

[0314] Selection of HLA-B7 Supermotif Bearing Epitopes

[0315] The same target antigen protein sequences are also analyzed to identify HLA-B7-supermotif-bearing sequences. The corresponding peptides are then synthesized and tested for binding to HLA-B*0702, the most common B7-supertype allele (i.e., the prototype B7 supertype allele). Those peptides that bind B*0702 with IC₅₀ of ≦500 nM are then tested for binding to other common B7-supertype molecules (B*3501, B*5101, B*5301, and B*5401) to identify those peptides that are capable of binding to three or more of the five B7-supertype alleles tested. Examples of HLA-B7 cross-binding supermotif-bearing peptides identified in accordance with this procedure are provided in Table XXIV.

[0316] Selection of A1 and A24 Motif-Bearing Epitopes

[0317] To further increase population coverage, HLA-A1 and -A24 motif-bearing epitopes can also be incorporated into potential vaccine constructs. An analysis of the protein sequence data from the target antigen utilized above is also performed to identify HLA-A1- and A24-motif-containing conserved sequences. The corresponding peptide sequence are then synthesized and tested for binding to the appropriate allele-specific HLA molecule, HLA-A1 or HLA-24. Peptides are identified that bind to the allele-specific HLA molecules at an IC₅₀ of ≦500 nM. Examples of peptides identified in accordance with this procedure are provided in Tables XXV and XXVI.

### Example 3

[0318] Confirmation of Immunogenicity

[0319] The nine cross-reactive candidate CTL A2-supermotif-bearing peptides identified in Example 2 were selected for in vitro immunogenicity testing. Testing was performed using the following methodology:

[0320] Target Cell Lines for Cellular Screening:

[0321] The .221A2.1 cell line, produced by transferring the HLA-A2.1 gene into the HLA-A, -B, -C null mutant human B-lymphoblastoid cell line 721.221, was used as the peptide-loaded target to measure activity of HLA-A2.1-restricted CTL. The colon adenocarcinoma cell lines SW403 and HT-29 were obtained from the American Type Culture Collection (ATCC) (Rockville, Md.). The cell lines that were obtained from ATCC were maintained under the culture conditions recommended by the supplier. All other cell lines were grown in RPMI-1640 medium supplemented with antibiotics, sodium pyruvate, nonessential amino acids and 10% (v/v) heat inactivated FCS. The colon cancer cells were treated with 100U/ml IFNγ (Genzyme) for 48 hours at 37° C. before use as targets in the ⁵¹Cr release and in situ IFNγ assays.

[0322] Primary CTL Induction Cultures:

[0323] Generation of Dendritic Cells (DC): PBMCs were thawed in RPMI with 30 μg/ml DNAse, washed twice and resuspended in complete medium (RPMI-1640 plus 5% AB human serum, non-essential amino acids, sodium pyruvate, L-glutamine and penicillin/strpetomycin). The monocytes were purified by plating 10×10⁶ PBMC/well in a 6-well plate. After 2 hours at 37° C., the non-adherent cells were removed by gently shaking the plates and aspirating the supernatants. The wells were washed a total of three times with 3 ml RPMI to remove most of the non-adherent and loosely adherent cells. Three ml of complete medium containing 50 ng/ml of GM-CSF and 1,000 U/ml of IL-4 were then added to each well. DC were used for CTL induction cultures following 7 days of culture.

[0324] Induction of CTL with DC and Peptide: CD8+ T-cells were isolated by positive selection with Dynal immunomagnetic beads (Dynabeads® M-450) and the detacha-bead® reagent. Typically about 200-250×10⁶ PBMC were processed to obtain 24×10⁶ CD8⁺ T-cells (enough for a 48-well plate culture). Briefly, the PBMCs were thawed in RPMI with 30 μg/ml DNAse, washed once with PBS containing 1% human AB serum and resuspended in PBS/1% AB serum at a concentration of 20×10⁶cells/ml. The magnetic beads were washed 3 times with PBS/AB serum, added to the cells (140 μl beads/20×10⁶ cells) and incubated for 1 hour at 4° C. with continuous mixing. The beads and cells were washed 4× with PBS/AB serum to remove the nonadherent cells and resuspended at 100×10⁶ cells/ml (based on the original cell number) in PBS/AB serum containing 100 μl/ml detacha-bead® reagent and 30 μg/ml DNAse. The mixture is incubated for 1 hour at room temperature with continuous mixing. The beads were washed again with PBS/AB/DNAse to collect the CD8+ T-cells. The DC were collected and centrifuged at 1300 rpm for 5-7 minutes, washed once with PBS with 1% BSA, counted and pulsed with 40 μg/ml of peptide at a cell concentration of 1-2×10⁶/ml in the presence of 3 μg/ml β₂-microglobulin for 4 hours at 20° C. The DC were then irradiated (4,200 rads), washed 1 time with medium and counted again.

[0325] Setting up induction cultures: 0.25 ml cytokine-generated DC (@1×10⁵ cells/ml) were co-cultured with 0.25 ml of CD8+ T-cells (@2×10⁶ cell/ml) in each well of a 48-well plate in the presence of 10 ng/ml of IL-7. rHuman IL10 was added the next day at a final concentration of 10 ng/ml and rhuman IL2 was added 48 hours later at 10 IU/ml.

[0326] Restimulation of the induction cultures with peptide-pulsed adherent cells: Seven and fourteen days after the primary induction the cells were restimulated with peptide-pulsed adherent cells. The PBMCS were thawed and washed twice with RPMI and DNAse. The cells were resuspended at 5×10⁶ cells/ml and irradiated at ˜4200 rads. The PBMCs were plated at 2×10⁶ in 0.5 ml complete medium per well and incubated for 2 hours at 37° C. The plates were washed twice with RPMI by tapping the plate gently to remove the nonadherent cells and the adherent cells pulsed with 10 μg/ml of peptide in the presence of 3 μg/ml β₂ microglobulin in 0.25 ml RPMI/5%AB per well for 2 hours at 37° C. Peptide solution from each well was aspirated and the wells were washed once with RPMI. Most of the media was aspirated from the induction cultures (CD8+ cells) and brought to 0.5 ml with fresh media. The cells were then transferred to the wells containing the peptide-pulsed adherent cells. Twenty four hours later rhuman IL10 was added at a final concentration of 10 ng/ml and rhuman IL2 was added the next day and again 2-3 days later at 50 IU/ml (Tsai et al., Critical Reviews in Immunology 18(1-2):65-75, 1998). Seven days later the cultures were assayed for CTL activity in a ⁵¹Cr release assay. In some experiments the cultures were assayed for peptide-specific recognition in the in situ IFNγ ELISA at the time of the second restimulation followed by assay of endogenous recognition 7 days later. After expansion, activity was measured in both assays for a side by side comparison.

[0327] Measurement of CTL Lytic Activity by ⁵¹Cr Release.

[0328] Seven days after the second restimulation, cytotoxicity was determined in a standard (5 hr) ⁵¹Cr release assay by assaying individual wells at a single E:T. Peptide-pulsed targets were prepared by incubating the cells with 10 μg/ml peptide overnight at 37° C.

[0329] Adherent target cells were removed from culture flasks with trypsin-EDTA. Target cells were labelled with 200 μCi of ⁵¹Cr sodium chromate (Dupont, Wilmington, Del.) for 1 hour at 37° C. Labelled target cells are resuspended at 10⁶ per ml and diluted 1:10 with K562 cells at a concentration of 3.3×10⁶/ml (an NK-sensitive erythroblastoma cell line used to reduce non-specific lysis). Target cells (100 μl) and 100 μl of effectors were plated in 96 well round-bottom plates and incubated for 5 hours at 37° C. At that time, 100 μl of supernatant were collected from each well and percent lysis was determined according formula: [(cpm of the test sample−cpm of the spontaneous ⁵¹Cr release sample)/(cpm of the maximal ⁵¹Cr release sample−cpm of the spontaneous ⁵¹Cr release sample)]×100. Maximum and spontaneous release were determined by incubating the labelled targets with 1% Trition X-100 and media alone, respectively. A positive culture was defined as one in which the specific lysis (sample-background) was 10% or higher in the case of individual wells and was 15% or more at the 2 highest E:T ratios when expanded cultures were assayed.

[0330] In situ Measurement of Human γIFN Production as an Indicator of Peptide-Specific and Endogenous Recognition

[0331] Immulon 2 plates were coated with mouse anti-human IFNγ monoclonal antibody (4 μg/ml 0.1M NaHCO₃, pH8.2) overnight at 4° C. The plates were washed with Ca²⁺, Mg²⁺-free PBS/0.05% Tween 20 and blocked with PBS/10% FCS for 2 hours, after which the CTLs (100 μl/well) and targets (100 μl/well) were added to each well, leaving empty wells for the standards and blanks (which received media only). The target cells, either peptide-pulsed or endogenous targets, were used at a concentration of 1×10⁶cells/ml. The plates were incubated for 48 hours at 37° C. with 5% CO₂.

[0332] Recombinant human IFNγ was added to the standard wells starting at 400 pg or 1200 pg/100 μl/well and the plate incubated for 2 hours at 37° C. The plates were washed and 100 μl of biotinylated mouse anti-human IFNγ monoclonal antibody (4 μg/ml in PBS/3%FCS/0.05% Tween 20) were added and incubated for 2 hours at room temperature. After washing again, 100 μl HRP-streptavidin were added and the plates incubated for 1 hour at room temperature. The plates were then washed 6× with wash buffer, 100 μl/well developing solution (TMB 1:1) were added, and the plates allowed to develop for 5-15 minutes. The reaction was stopped with 50 μl/well 1M H₃PO₄ and read at OD450. A culture was considered positive if it measured at least 50 pg of IFNγ/well above background and was twice the background level of expression.

[0333] CTL Expansion. Those cultures that demonstrated specific lytic activity against peptide-pulsed targets and/or tumor targets were expanded over a two week period with anti-CD3. Briefly, 5×10⁴ CD8+ cells were added to a T25 flask containing the following: 1×10⁶ irradiated (4,200 rad) PBMC (autologous or allogeneic) per ml, 2×10⁵ irradiated (8,000 rad) EBV-transformed cells per ml, and OKT3 (anti-CD3) at 30 ng per ml in RPMI-1640 containing 10% (v/v) human AB serum, non-essential amino acids, sodium pyruvate, 25 μM 2-mercaptoethanol, L-glutamine and penicillin/streptomycin. rHuman IL2 was added 24 hours later at a final concentration of 200 IU/ml and every 3 days thereafter with fresh media at 50 IU/ml. The cells were split if the cell concentration exceeded 1×10⁶/ml and the cultures were assayed between days 13 and 15 at E:T ratios of 30, 10, 3 and 1:1 in the ⁵¹Cr release assay or at 1×10⁶/ml in the in situ IFNγ assay using the same targets as before the expansion.

[0334] Immunogenicity of A2 Supermotif-Bearing Peptides

[0335] A2-supermotif cross-reactive binding peptides were tested in the cellular assay for the ability to induce peptide-specific CTL in normal individuals. In this analysis, a peptide was considered to be an epitope if it induced peptide-specific CTLs in at least 2 donors (unless otherwise noted) and if those CTLs also recognized the endogenously expressed peptide. Peptides that were able to induce a peptide-specific CTL response in at least 2 normal donors are shown in Table XXVII. Further analysis demonstrated those that also recognized target cells pulsed with the wild-type peptide and tumor targets that endogenously express HER2/neu (Table XXVII). An additional wild-type peptide, Her2/neu.5 was selected for evaluation based on its A2.1 binding affinity and, although it binds to only 2 HLA-A2 supertype molecules, it was capable of generating a strong CTL response that was both peptide- and tumor-specific.

[0336] Immunogenicity was additionally confirmed using PBMCs isolated from cancer patients. Briefly, PBMCs were isolated from two patients with ovarian cancer, re-stimulated with peptide-pulsed monocytes and assayed for the ability to recognize peptide-pulsed target cells as well as transfected cells endogenously expressing the antigen. These data indicated that Her2/neu.435 was recognized in 2 donors as well as Her2/neu.369, Her2/neu.952, and Her2/neu.48. Her2/neu.689 is also an epitope, but not a supertype binder. Of the other peptides tested, Her2/neu.665 and Her2/neu.773 were recognized by CTLs from only one of the two patients and CTLs to Her2/neu.153 and Her2/neu.789 recognized peptide-pulsed targets only.

[0337] Evaluation of A*03/A11 Immunogenicity

[0338] HLA-A3 supermotif-bearing cross-reactive binding peptides are also evaluated for immunogenicity using methodology analogous for that used to evaluate the immunogenicity of the HLA-A2 supermotif peptides. Using this procedure, peptides that induce an immune response are identified. Examples of such peptides are shown in Table XXIII.

[0339] Evaluation of Immunogenicity of Motif/Supermotif-Bearing Peptides.

[0340] Analogous methodology, as appreciated by one of ordinary skill in the art, is employed to determine immunogenicity of peptides bearing HLA class I motifs and/or supermotifs set out herein. Using such a prodcedure peptides that induce an immune response are identified.

### Example 4

[0341] Implementation of the Extended Supermotif to Improve the Binding Capacity of Native Epitopes by Creating Analogs

[0342] HLA motifs and supermotifs (comprising primary and/or secondary residues) are useful in the identification and preparation of highly cross-reactive native peptides, as demonstrated herein. Moreover, the definition of HLA motifs and supermotifs also allows one to engineer highly cross-reactive epitopes by identifying residues within a native peptide sequence which can be analogued, or “fixed” to confer upon the peptide certain characteristics, e.g. greater cross-reactivity within the group of HLA molecules that comprise a supertype, and/or greater binding affinity for some or all of those HLA molecules. Examples of analog peptides that exhibit modulated binding affinity are set forth in this example and provided in Tables XXII through XXVII.

[0343] Analoguing at Primary Anchor Residues

[0344] Peptide engineering strategies were implemented to further increase the cross-reactivity of the epitopes identified above. On the basis of the data disclosed, e.g., in related and co-pending U.S. Ser. No. 09/226,775, the main anchors of A2-supermotif-bearing peptides are altered, for example, to introduce a preferred L, I, V, or M at position 2, and I or V at the C-terminus.

[0345] Peptides that exhibit at least weak A*0201 binding (IC₅₀ of 5000 nM or less), and carrying suboptimal anchor residues at either position 2, the C-terminal position, or both, can be fixed by introducing canonical substitutions (L at position 2 and V at the C-terminus). Those analogued peptides that show at least a three-fold increase in A*0201 binding and bind with an IC₅₀ of 500 nM, or less were then tested for A2 cross-reactive binding along with their wild-type (WT) counterparts. Analogued peptides that bind at least three of the five A2 supertype alleles were then selected for cellular screening analysis (Table XXVII).

[0346] Additionally, the selection of analogs for cellular screening analysis was further restricted by the capacity of the WT parent peptide to bind at least weakly, i.e., bind at an IC₅₀ of 500 nM or less, to three of more A2 supertype alleles. The rationale for this requirement is that the WT peptides must be present endogenously in sufficient quantity to be biologically relevant. Analogued peptides have been shown to have increased immunogenicity and cross-reactivity by T cells specific for the WT epitope (see, e.g., Parkhurst et al., J. Immunol. 157:2539, 1996; and Pogue et al., Proc. Natl. Acad. Sci. USA 92:8166, 1995).

[0347] In the cellular screening of these peptide analogs, it is important to demonstrate that analog-specific CTLs are also able to recognize the wild-type peptide and, when possible, tumor targets that endogenously express the epitope.

[0348] Of the 20 peptides identified in Example 2 that bound to HLA-A*0201 at a high affinity, 15 carried suboptimal primary anchor residues and met the criterion for analoguing at primary anchor residues by introducing a canonical substitution. Analogs of six of the A*0201-binding peptides were created and tested for primary binding to HLA-A*0201 and supertype binding (Table XXII). In 4 of 6 cases, binding to HLA-A*0201 was improved at least three-fold. In 4 cases, crossbinding capability was also improved. In one instance, peptide Her2/neu.153 did not show a three-fold increase in binding to HLA-A*0201, but crossbinding was improved.

[0349] Additionally, 22 peptides that weakly bound to HLA-A*0201 that carry suboptimal anchors were also identified and can also be analogued.

[0350] Two analogs of Her2/neu.5, two analogs of Her2/neu.369, one version of Her2/neu.952, and one version of Her2/neu.665 were selected for cellular screening studies. As shown in Table XXVII, both Her2/neu.369L2V9 and V2V9 induced peptide-specific CTLs and those CTLs also recognized the target tumor cells expressing that endogenously express the antigen. Her2neu.5B3V9 and Her2/neu.952L2B7V10 induced peptide-specific CTLs in at least 2 donors, but when the positive cultures were expanded, no wild-type peptide or endogenous recognition was observed.

[0351] The Her2/neu.665L2V9 analog exhibited binding to four of the five A2 supertype alleles tested, whereas the wildtype peptide only binds two of the five alleles. In the cellular screening analysis, a strong peptide-specific CTL response was observed. The positive cultures were expanded and assayed for peptide and endogenous recognition. Peptide-specific CTL activity was maintained in some of the cultures, but no corresponding endogenous recognition was observed.

[0352] Using methodology similar to that used to develop HLA-A2 analogs, analogs of HLA-A3 and HLA-B7 supermotif-bearing epitopes are also generated. For example, peptides binding at least weakly to ⅗ of the A3-supertype molecules can be engineered at primary anchor residues to possess a preferred residue (V, S, M, or A) at position 2. The analog peptides are then tested for the ability to bind A*03 and A*11 (prototype A3 supertype alleles). Those peptides that demonstrate ≦500 nM binding capacity are then tested for A3-supertype cross-reactivity. Examples of HLA-A3 supermotif analog peptides are provided in Table XXIII.

[0353] B7 supermotif-bearing peptides can, for example, be engineered to possess a preferred residue (V, I, L, or F) at the C-terminal primary anchor position (see, e.g. Sidney et al. (J. Immunol. 157:3480-3490, 1996). Analoged peptides are then tested for cross-reactive binding to B7 supertype alleles. Examples of B7-supermotif-bearing analog peptides are provided in Table XXIV.

[0354] Similarly, HLA-A 1 and HLA-A24 motif-bearing peptides can be engineered at primary anchor residues to improved binding to the allele-specific HLA molecule or to improve cross-reactive binding. Examples of analoged HLA-A1 and HLA-A24 motif-bearing peptides are provided in Tables XXV and XXVI.

[0355] Analoged peptides that exhibit improved binding and/or or cross-reactivity are evaluated for immunogenicity using methodology similar to that described for the analysis of HLA-A2 supermotif-bearing peptides. Using such a procedure, peptides that induce an immune response are identified, e.g. Table XXIII.

[0356] Analoguing at Secondary Anchor Residues

[0357] Moreover, HLA supermotifs are of value in engineering highly cross-reactive peptides and/or peptides that bind HLA molecules with increased affinity by identifying particular residues at secondary anchor positions that are associated with such properties. Examples of such analoged peptides are provided in Tables XXII-XXIV.

[0358] For example, the binding capacity of a B7 supermotif-bearing peptide representing a discreet single amino acid substitution at position 1 can be analyzed. A peptide can, for example, be analogued to substitute L with F at position 1 and subsequently be evaluated for increased binding affinity/and or increased cross-reactivity. This procedure will identify analogued peptides with modulated binding affinity.

[0359] Analoged peptides that exhibit improved binding and/or or cross-reactivity are evaluated for immunogenicity using methodology similar to that described for the analysis of HLA-A2 supermotif-bearing peptides. Using such a procedure, peptides that induce an immune response are identified.

[0360] Other Analoguing Strategies

[0361] Another form of peptide analoguing, unrelated to the anchor positions, involves the substitution of a cysteine with α-amino butyric acid. Due to its chemical nature, cysteine has the propensity to form disulfide bridges and sufficiently alter the peptide structurally so as to reduce binding capacity. Subtitution of α-amino butyric acid for cysteine not only alleviates this problem, but has been shown to improve binding and crossbinding capabilities in some instances (see, e.g., the review by Sette et al., In: Persistent Viral Infections, Eds. R. Ahmed and I. Chen, John Wiley & Sons, England, 1999).

[0362] Analoged peptides that exhibit improved binding and/or or cross-reactivity are evaluated for immunogenicity using methodology similar to that described for the analysis of HLA-A2 supermotif-bearing peptides. Using such a procedure, peptides that induce an immune response are identified.

[0363] This Example therefore demonstrates that by the use of even single amino acid substitutions, the binding affinity and/or cross-reactivity of peptide ligands for HLA supertype molecules is modulated.

### Example 5

[0364] Identification of Peptide Epitope Sequences with HLA-DR Binding Motifs

[0365] Peptide epitopes bearing an HLA class II supermotif or motif may also be identified as outlined below using methodology similar to that described in Examples 1-3.

[0366] Selection of HLA-DR-Supermotif-Bearing Epitopes

[0367] To identify HLA class II HTL epitopes, the HER2/neu protein sequence was analyzed for the presence of sequences bearing an HLA-DR-motif or supermotif. Specifically, 15-mer sequences were selected comprising a DR-supermotif, further comprising a 9-mer core, and three-residue N- and C-terminal flanking regions (15 amino acids total).

[0368] Protocols for predicting peptide binding to DR molecules have been developed (Southwood et al., J. Immunol. 160:3363-3373, 1998). These protocols, specific for individual DR molecules, allow the scoring, and ranking, of 9-mer core regions. Each protocol not only scores peptide sequences for the presence of DR-supermotif primary anchors (i.e., at position 1 and position 6) within a 9-mer core, but additionally evaluates sequences for the presence of secondary anchors. Using allele specific selection tables (see, e.g., Southwood et al., ibid.), it has been found that these protocols efficiently select peptide sequences with a high probability of binding a particular DR molecule. Additionally, it has been found that performing these protocols in tandem, specifically those for DR1, DR4w4, and DR7, can efficiently select DR cross-reactive peptides.

[0369] The HER2/neu-derived peptides identified above were tested for their binding capacity for various common HLA-DR molecules. All peptides were initially tested for binding to the DR molecules in the primary panel: DR1, DR4w4, and DR7. Peptides binding at least 2 of these 3 DR molecules with an IC₅₀ value of 1000 nM or less, were then tested for binding to DR5*0101, DRB1*1501, DRB1*1101, DRB1*0802, and DRB1*1302. Peptides were considered to be cross-reactive DR supertype binders if they bound at an IC₅₀ value of 1000 nM or less to at least 5 of the 8 alleles tested.

[0370] Following the strategy outlined above, 188 DR supermotif-bearing sequences were identified within the HER2/neu protein sequence. Of those, 41 scored positive in 2 of the 3 combined DR 147 algorithms. These peptides were synthesized and tested for binding to HLA-DRB1*0101, DRB1*0401, DRB1*0701. Of the 41 peptides tested, 18 bound at least 2 of the 3 alleles (Table XXVIII).

[0371] These 18 peptides were then tested for binding to secondary DR supertype alleles: DRB5*0101, DRB1*1501, DRB1*1101, DRB1*0802, and DRB1*1302. Nine peptides were identified that bound at least 5 of the 8 alleles tested, of which 8 occurred in distinct, non-overlapping regions (Table XXIX).

[0372] Selection of DR3 Motif Peptides

[0373] Because HLA-DR3 is an allele that is prevalent in Caucasian, Black, and Hispanic populations, DR3 binding capacity is an important criterion in the selection of HTL epitopes. However, data generated previously indicated that DR3 only rarely cross-reacts with other DR alleles (Sidney et al., J. Immunol. 149:2634-2640, 1992; Geluk et al., J. Immunol. 152:5742-5748, 1994; Southwood et al., J. Immunol. 160:3363-3373, 1998). This is not entirely surprising in that the DR3 peptide-binding motif appears to be distinct from the specificity of most other DR alleles. For maximum efficiency in developing vaccine candidates it would be desirable for DR3 motifs to be clustered in proximity with DR supermotif regions. Thus, peptides shown to be candidates may also be assayed for their DR3 binding capacity. However, in view of the distinct binding specificity of the DR3 motif, peptides binding only to DR3 can also be considered as candidates for inclusion in a vaccine formulation.

[0374] To efficiently identify peptides that bind DR3, the HER2/neu protein sequence was analyzed for conserved sequences carrying one of the two DR3 specific binding motifs (Table III) reported by Geluk et al. (J. Immunol. 152:5742-5748, 1994). Forty-six motif-positive peptides were identified. The corresponding peptides were then synthesized and tested for the ability to bind DR3 with an affinity of 1000 nM or better, i.e., less than 1000 nM. Seven peptides were found that met this binding criterion (Table XXX), and thereby qualify as HLA class II high affinity binders.

[0375] Additionally, the 7 DR3 binders were tested for binding to the DR supertype alleles (Table XXXI). Four of the seven DR3 binders bound at least 3 other DR alleles, and one peptide, Her2/neu.886, was a cross-reactive supertype binder as well. Conversely, the DR supertype cross-reactive binding peptides were also tested for DR3 binding capacity. The cross-reactive DR supermotif-bearing peptides showed little capacity to bind DR3 molecules (Table XXXI).

[0376] DR3 binding epitopes identified in this manner may then be included in vaccine compositions with DR supermotif-bearing peptide epitopes.

[0377] In summary, 8 DR supertype cross-reactive binding peptides and 7 DR3 binding peptides were identified from the HER2/neu protein sequence, with one peptide shared between the two motifs. Of these, 5 DR supertype and 5 DR3-binding peptides were located in the intracellular domain.

[0378] Similarly to the case of HLA class I motif-bearing peptides, the class II motif-bearing peptides may be analogued to improve affinity or cross-reactivity. For example, aspartic acid at position 4 of the 9-mer core sequence is an optimal residue for DR3 binding, and substitution for that residue may improve DR 3 binding. Analoged peptides are evaluated for immunogenicity in accordance with the methodology of Example 6.

### Example 6

[0379] Immunogenicity of HTL Epitopes

[0380] This example determines immunogenic DR supermotif- and DR3 motif-bearing epitopes among those identified using the methodology in Example 5. Immunogenicity of HTL epitopes are evaluated in a manner analogous to the determination of immunogenicity of CTL epitopes by assessing the ability to stimulate HTL responses and/or by using appropriate transgenic mouse models. Immunogenicity is determined by screening for: 1.) in vitro primary induction using normal PBMC or 2.) recall responses from cancer patient PBMCs.

### Example 7

[0381] Calculation of Phenotypic Frequencies of HLA-Supertypes in Various Ethnic Backgrounds to Determine Breadth of Population Coverage

[0382] This example illustrates the assessment of the breadth of population coverage of a vaccine composition comprised of multiple epitopes comprising multiple supermotifs and/or motifs.

[0383] In order to analyze population coverage, gene frequencies of HLA alleles were determined. Gene frequencies for each HLA allele were calculated from antigen or allele frequencies utilizing the binomial distribution formulae gf=1−(SQRT(1−af)) (see, e.g., Sidney et al., Human Immunol. 45:79-93, 1996). To obtain overall phenotypic frequencies, cumulative gene frequencies were calculated, and the cumulative antigen frequencies derived by the use of the inverse formula [af=1−(1−Cgf)²].

[0384] Where frequency data was not available at the level of DNA typing, correspondence to the serologically defined antigen frequencies was assumed. To obtain total potential supertype population coverage no linkage disequilibrium was assumed, and only alleles confirmed to belong to each of the supertypes were included (minimal estimates). Estimates of total potential coverage achieved by inter-loci combinations were made by adding to the A coverage the proportion of the non-A covered population that could be expected to be covered by the B alleles considered (e.g., total=A+B*(1−A)). Confirmed members of the A3-like supertype are A3, A11, A31, A*3301, and A*6801. Although the A3-like supertype may also include A34, A66, and A*7401, these alleles were not included in overall frequency calculations. Likewise, confirmed members of the A2-like supertype family are A*0201, A*0202, A*0203, A*0204, A*0205, A*0206, A*0207, A*6802, and A*6901. Finally, the B7-like supertype-confirmed alleles are: B7, B*3501-03, B51, B*5301, B*5401, B*5501-2, B*5601, B*6701, and B*7801 (potentially also B*1401, B*3504-06, B*4201, and B*5602).

[0385] Population coverage achieved by combining the A2-, A3- and B7-supertypes is approximately 86% in five major ethnic groups (see Table XXI). Coverage may be extended by including peptides bearing the A1 and A24 motifs. On average, A1 is present in 12% and A24 in 29% of the population across five different major ethnic groups (Caucasian, North American Black, Chinese, Japanese, and Hispanic). Together, these alleles are represented with an average frequency of 39% in these same ethnic populations. The total coverage across the major ethnicities when A1 and A24 are combined with the coverage of the A2-, A3- and B7-supertype alleles is >95%. An analogous approach can be used to estimate population coverage achieved with combinations of class II motif-bearing epitopes.

### Example 8

[0386] Recognition of Generation of Endogenous Processed Antigens After Priming

[0387] This example determines that CTL induced by native or analogued peptide epitopes identified and selected as described in Examples 1-6 recognize endogenously synthesized, i.e., native antigens, using a transgenic mouse model.

[0388] Effector cells isolated from transgenic mice that are immunized with peptide epitopes (as described, e.g., in Wentworth et al., Mol. Immunol. 32:603, 1995), for example HLA-A2 supermotif-bearing epitopes, are re-stimulated in vitro using peptide-coated stimulator cells. Six days later, effector cells are assayed for cytotoxicity and the cell lines that contain peptide-specific cytotoxic activity are further re-stimulated. An additional six days later, these cell lines are tested for cytotoxic activity on ⁵¹Cr labeled Jurkat-A2.1/K^{b} target cells in the absence or presence of peptide, and also tested on ⁵¹Cr labeled target cells bearing the endogenously synthesized antigen, i.e. cells that are stably transfected with TAA expression vectors.

[0389] The result will demonstrate that CTL lines obtained from animals primed with peptide epitope recognize endogenously synthesized antigen. The choice of transgenic mouse model to be used for such an analysis depends upon the epitope(s) that is being evaluated. In addition to HLA-A*0201/K^{b} transgenic mice, several other transgenic mouse models including mice with human A11, which may also be used to evaluate A3 epitopes, and B7 alleles have been characterized and others (e.g., transgenic mice for HLA-A1 and A24) are being developed. HLA-DR1 and HLA-DR3 mouse models have also been developed, which may be used to evaluate HTL epitopes.

### Example 9

[0390] Activity of CTL-HTL Conjugated Epitopes in Transgenic Mice

[0391] This example illustrates the induction of CTLs and HTLs in transgenic mice by use of a tumor associated antigen CTL/HTL peptide conjugate whereby the vaccine composition comprises peptides to be administered to a cancer patient. The peptide composition can comprise multiple CTL and/or HTL epitopes and further, can comprise epitopes selected from multiple-tumor associated antigens. The epitopes are identified using methodology as described in Examples 1-6 This analysis demonstrates the enhanced immunogenicity that can be achieved by inclusion of one or more HTL epitopes in a vaccine composition. Such a peptide composition can comprise an HTL epitope conjugated to a preferred CTL epitope containing, for example, at least one CTL epitope selected from Tables XXVII and XXIII-XXVI, or other analogs of that epitope. The HTL epitope is, for example, selected from Table XI. The peptides may be lipidated, if desired.

[0392] Immunization procedures: Immunization of transgenic mice is performed as described (Alexander et al., J. Immunol. 159:4753-4761, 1997). For example, A2/K^{b} mice, which are transgenic for the human HLA A2.1 allele and are useful for the assessment of the immunogenicity of HLA-A*0201 motif- or HLA-A2 supermotif-bearing epitopes, are primed subcutaneously (base of the tail) with 0.1 ml of peptide conjugate formulated in saline, or DMSO/saline. Seven days after priming, splenocytes obtained from these animals are restimulated with syngenic irradiated LPS-activated lymphoblasts coated with peptide.

[0393] The target cells for peptide-specific cytotoxicity assays are Jurkat cells transfected with the HLA-A2.1/K^{b} chimeric gene (e.g., Vitiello et al., J. Exp. Med. 173:1007, 1991).

[0394] In vitro CTL activation: One week after priming, spleen cells (30×10⁶ cells/flask) are co-cultured at 37° C. with syngeneic, irradiated (3000 rads), peptide coated lymphoblasts (10×10⁶ cells/flask) in 10 ml of culture medium/T25 flask. After six days, effector cells are harvested and assayed for cytotoxic activity.

[0395] Assay for cytotoxic activity: Target cells (1.0 to 1.5×10⁶) are incubated at 37° C. in the presence of 200 μl of ⁵¹Cr. After 60 minutes, cells are washed three times and resuspended in medium. Peptide is added where required at a concentration of 1 μg/ml. For the assay, 10^{4 51}Cr-labeled target cells are added to different concentrations of effector cells (final volume of 200 μl) in U-bottom 96-well plates. After a 6 hour incubation period at 37° C., a 0.1 ml aliquot of supernatant is removed from each well and radioactivity is determined in a Micromedic automatic gamma counter. The percent specific lysis is determined by the formula: percent specific release=100×(experimental release−spontaneous release)/(maximum release−spontaneous release). To facilitate comparison between separate CTL assays run under the same conditions, % ⁵¹Cr release data is expressed as lytic units/10⁶ cells. One lytic unit is arbitrarily defined as the number of effector cells required to achieve 30% lysis of 10,000 target cells in a 6 hour ⁵¹Cr release assay. To obtain specific lytic units/10⁶, the lytic units/10⁶ obtained in the absence of peptide is subtracted from the lytic units/10⁶ obtained in the presence of peptide. For example, if 30% ⁵¹Cr release is obtained at the effector (E): target (T) ratio of 50:1 (i.e., 5×10⁵ effector cells for 10,000 targets) in the absence of peptide and 5:1 (i.e., 5×10⁴ effector cells for 10,000 targets) in the presence of peptide, the specific lytic units would be: [(1/50,000)−(1/500,000)]×10⁶=18 LU.

[0396] The results are analyzed to assess the magnitude of the CTL responses of animals injected with the immunogenic CTL/HTL conjugate vaccine preparation. The magnitude and frequency of the response can also be compared to the the CTL response achieved using the CTL epitopes by themselves. Analyses similar to this may be performed to evaluate the immunogenicity of peptide conjugates containing multiple CTL epitopes and/or multiple HTL epitopes. In accordance with these procedures it is found that a CTL response is induced, and concomitantly that an HTL response is induced upon administration of such compositions.

### Example 10

[0397] Selection of CTL and HTL Epitopes for Inclusion in a Cancer Vaccine.

[0398] This example illustrates the procedure for the selection of peptide epitopes for vaccine compositions of the invention. The peptides in the composition can be in the form of a nucleic acid sequence, either single or one or more sequences (i.e., minigene) that encodes peptide(s), or may be single and/or polyepitopic peptides.

[0399] The following principles are utilized when selecting an array of epitopes for inclusion in a vaccine composition. Each of the following principles is balanced in order to make the selection.

[0400] Epitopes are selected which, upon administration, mimic immune responses that have been observed to be correlated with tumor clearance. For example, a vaccine can include 3-4 epitopes that come from at least one TAA. Epitopes from one TAA can be used in combination with epitopes from one or more additional TAAs to produce a vaccine that targets tumors with varying expression patterns of frequently-expressed TAAs as described, e.g., in Example 15.

[0401] Epitopes are preferably selected that have a binding affinity (IC50) of 500 nM or less, often 200 nM or less, for an HLA class I molecule, or for a class II molecule, 1000 nM or less.

[0402] Sufficient supermotif bearing peptides, or a sufficient array of allele-specific motif bearing peptides, are selected to give broad population coverage. For example, epitopes are selected to provide at least 80% population coverage. A Monte Carlo analysis, a statistical evaluation known in the art, can be employed to assess breadth, or redundancy, of population coverage.

[0403] When selecting epitopes from cancer-related antigens it is often preferred to select analogs because the patient may have developed tolerance to the native epitope.

[0404] When creating a polyepitopic composition, e.g. a minigene, it is typically desirable to generate the smallest peptide possible that encompasses the epitopes of interest, although spacers or other flanking sequences can also be incorporated. The principles employed are often similar as those employed when selecting a peptide comprising nested epitopes. Additionally, however, upon determination of the nucleic acid sequence to be provided as a minigene, the peptide sequence encoded thereby is analyzed to determine whether any “junctional epitopes” have been created. A junctional epitope is a potential HLA binding epitope, as predicted, e.g., by motif analysis. Junctional epitopes are generally to be avoided because the recipient may bind to an HLA molecule and generate an immune response to that epitope, which is not present in a native protein sequence.

[0405] CTL epitopes for inclusion in vaccine compositions are, for example, selected from those listed in Tables XXVII and XXIII-XXVI. Examples of HTL epitopes that can be included in vaccine compositions are provided in Table XXXI. A vaccine composition comprised of selected peptides, when administered, is safe, efficacious, and elicits an immune response that results in tumor cell killing and reduction of tumor size or mass.

### Example 11

[0406] Construction of Minigene Multi-Epitope DNA Plasmids

[0407] This example provides general guidance for the construction of a minigene expression plasmid. Minigene plasmids may, of course, contain various configurations of CTL and/or HTL epitopes or epitope analogs as described herein. Expression plasmids have been constructed and evaluated as described, for example, in co-pending U.S. Ser. No. 09/311,784 filed May 13, 1999.

[0408] A minigene expression plasmid may include multiple CTL and HTL peptide epitopes. In the present example, HLA-A2, -A3, -B7 supermotif-bearing peptide epitopes and HLA-A1 and -A24 motif-bearing peptide epitopes are used in conjunction with DR supermotif-bearing epitopes and/or DR3 epitopes. Preferred epitopes are identified, for example, in Tables XXVII, XXII-XXVI, and XXI. HLA class I supermotif or motif-bearing peptide epitopes derived from multiple TAAs are selected such that multiple supermotifs/motifs are represented to ensure broad population coverage. Similarly, HLA class II epitopes are selected from multiple tumor antigens to provide broad population coverage, i.e. both HLA DR-1-4-7 supermotif-bearing epitopes and HLA DR-3 motif-bearing epitopes are selected for inclusion in the minigene construct. The selected CTL and HTL epitopes are then incorporated into a minigene for expression in an expression vector.

[0409] This example illustrates the methods to be used for construction of such a minigene-bearing expression plasmid. Other expression vectors that may be used for minigene compositions are available and known to those of skill in the art.

[0410] The minigene DNA plasmid contains a consensus Kozak sequence and a consensus murine kappa Ig-light chain signal sequence followed by CTL and/or HTL epitopes selected in accordance with principles disclosed herein. The sequence encodes an open reading frame fused to the Myc and His antibody epitope tag coded for by the pcDNA 3.1 Myc-His vector.

[0411] Overlapping oligonucleotides, for example eight oligonucleotides, averaging approximately 70 nucleotides in length with 15 nucleotide overlaps, are synthesized and HPLC-purified. The oligonucleotides encode the selected peptide epitopes as well as appropriate linker nucleotides, Kozak sequence, and signal sequence. The final multiepitope minigene is assembled by extending the overlapping oligonucleotides in three sets of reactions using PCR. A Perkin/Elmer 9600 PCR machine is used and a total of 30 cycles are performed using the following conditions: 95° C. for 15 sec, annealing temperature (5° below the lowest calculated Tm of each primer pair) for 30 sec, and 72° C. for 1 min.

[0412] For the first PCR reaction, 5 μg of each of two oligonucleotides are annealed and extended: Oligonucleotides 1+2, 3+4, 5+6, and 7+8 are combined in 100 μl reactions containing Pfu polymerase buffer (1×=10 mM KCL, 10 mM (NH₄)₂SO₄, 20 mM Tris-chloride, pH 8.75, 2 mM MgSO₄, 0.1% Triton X-100, 100 μg/ml BSA), 0.25 mM each dNTP, and 2.5 U of Pfu polymerase. The full-length dimer products are gel-purified, and two reactions containing the product of 1+2 and 3+4, and the product of 5+6 and 7+8 are mixed, annealed, and extended for 10 cycles. Half of the two reactions are then mixed, and 5 cycles of annealing and extension carried out before flanking primers are added to amplify the full length product for 25 additional cycles. The full-length product is gel-purified and cloned into pCR-blunt (Invitrogen) and individual clones are screened by sequencing.

### Example 12

[0413] The Plasmid Construct and the Degree to which It Induces Immunogenicity.

[0414] The degree to which the plasmid construct prepared using the methodology outlined in Example 11 is able to induce immunogenicity is evaluated through in vivo injections into mice and subsequent in vitro assessment of CTL and HTL activity, which are analysed using cytotoxicity and proliferation assays, respectively, as detailed e.g., in U.S. Ser. No. 09/311,784 filed May 13, 1999 and Alexander et al., Immunity 1:751-761, 1994.

[0415] Alternatively, plasmid constructs can be evaluated in vitro by testing for epitope presentation by APC following transduction or transfection of the APC with an epitope-expressing nucleic acid construct. Such a study determines “antigenicity” and allows the use of human APC. The assay determines the ability of the epitope to be presented by the APC in a context that is recognized by a T cell by quantifying the density of epitope-HLA class I complexes on the cell surface. Quantitation can be performed by directly measuring the amount of peptide eluted from the APC (see, e.g., Sijts et al., J. Immunol. 156:683-692, 1996; Demotz et al., Nature 342:682-684, 1989); or the number of peptide-HLA class I complexes can be estimated by measuring the amount of lysis or lymphokine release induced by infected or transfected target cells, and then determining the concentration of peptide necessary to obtained equivalent levels of lysis or lymphokine release (see, e.g., Kageyama et al., J. Immunol. 154:567-576, 1995).

[0416] To assess the capacity of the pMin minigene construct (e.g. a pMin minigene construct generated as decribed in U.S. Ser. No. 09/311,784) to induce CTLs in vivo, HLA-A11/K^{b} transgenic mice, for example, are immunized intramuscularly with 100 μg of naked cDNA. As a means of comparing the level of CTLs induced by cDNA immunization, a control group of animals is also immunized with an actual peptide composition that comprises multiple epitopes synthesized as a single polypeptide as they would be encoded by the minigene.

[0417] Splenocytes from immunized animals are stimulated twice with each of the respective compositions (peptide epitopes encoded in the minigene or the polyepitopic peptide), then assayed for peptide-specific cytotoxic activity in a ⁵¹Cr release assay. The results indicate the magnitude of the CTL response directed against the A3-restricted epitope, thus indicating the in vivo immunogenicity of the minigene vaccine and polyepitopic vaccine. It is, therefore, found that the minigene elicits immune responses directed toward the HLA-A3 supermotif peptide epitopes as does the polyepitopic peptide vaccine. A similar analysis is also performed using other HLA-A2 and HLA-B7 transgenic mouse models to assess CTL induction by HLA-A2 and HLA-B7 motif or supermotif epitopes.

[0418] To assess the capacity of a class II epitope encoding minigene to induce HTLs in vivo, I-A^{b} restricted mice, for example, are immunized intramuscularly with 100 μg of plasmid DNA. As a means of comparing the level of HTLs induced by DNA immunization, a group of control animals is also immunized with an actual peptide composition emulsified in complete Freund's adjuvant. CD4+ T cells, i.e. HTLs, are purified from splenocytes of immunized animals and stimulated with each of the respective compositions (peptides encoded in the minigene). The HTL response is measured using a ³H-thymidine incorporation proliferation assay, (see, e.g., Alexander et al. Immunity 1:751-761, 1994). The results indicate the magnitude of the HTL response, thus demonstrating the in vivo immunogenicity of the minigene.

[0419] DNA minigenes, constructed as described in Example 11, may also be evaluated as a vaccine in combination with a boosting agent using a prime boost protocol. The boosting agent may consist of recombinant protein (e.g., Barnett et al., Aids Res. and Human Retroviruses 14, Supplement 3:S299-S309, 1998) or recombinant vaccinia, for example, expressing a minigene or DNA encoding the complete protein of interest (see, e.g., Hanke et al., Vaccine 16:439-445, 1998; Sedegah et al., Proc. Natl. Acad. Sci USA 95:7648-53, 1998; Hanke and McMichael, Immunol. Letters 66:177-181, 1999; and Robinson et al., Nature Med. 5:526-34, 1999).

[0420] For example, the efficacy of the DNA minigene may be evaluated in transgenic mice. In this example, A2.1/K^{b} transgenic mice are immunized IM with 100 μg of the DNA minigene encoding the immunogenic peptides. After an incubation period (ranging from 3-9 weeks), the mice are boosted IP with 10⁷ pfu/mouse of a recombinant vaccinia virus expressing the same sequence encoded by the DNA minigene. Control mice are immunized with 100 μg of DNA or recombinant vaccinia without the minigene sequence, or with DNA encoding the minigene, but without the vaccinia boost. After an additional incubation period of two weeks, splenocytes from the mice are immediately assayed for peptide-specific activity in an ELISPOT assay. Additionally, splenocytes are stimulated in vitro with the A2-restricted peptide epitopes encoded in the minigene and recombinant vaccinia, then assayed for peptide-specific activity in an IFN-γ ELISA. It is found that the minigene utilized in a prime-boost mode elicits greater immune responses toward the HLA-A2 supermotif peptides than with DNA alone. Such an analysis is also performed using other HLA-A11 and HLA-B7 transgenic mouse models to assess CTL induction by HLA-A3 and HLA-B7 motif or supermotif epitopes.

### Example 13

[0421] Peptide Composition for Prophylactic Uses

[0422] Vaccine compositions of the present invention are used to prevent cancer in persons who are at risk for developing a tumor. For example, a polyepitopic peptide epitope composition (or a nucleic acid comprising the same) containing multiple CTL and HTL epitopes such as those selected in Examples 9 and/or 10, which are also selected to target greater than 80% of the population, is administered to an individual at risk for a cancer, e.g., breast cancer. The composition is provided as a single polypeptide that encompasses multiple epitopes. The vaccine is administered in an aqueous carrier comprised of Freunds Incomplete Adjuvant. The dose of peptide for the initial immunization is from about 1 to about 50,000 μg, generally 100-5,000 μg, for a 70 kg patient. The initial administration of vaccine is followed by booster dosages at 4 weeks followed by evaluation of the magnitude of the immune response in the patient, by techniques that determine the presence of epitope-specific CTL populations in a PBMC sample. Additional booster doses are administered as required. The composition is found to be both safe and efficacious as a prophylaxis against cancer.

[0423] Alternatively, the polyepitopic peptide composition can be administered as a nucleic acid in accordance with methodologies known in the art and disclosed herein.

### Example 14

[0424] Polyepitopic Vaccine Compositions Derived from Native TAA Sequences

[0425] A native TAA polyprotein sequence is screened, preferably using computer algorithms defined for each class I and/or class II supermotif or motif, to identify “relatively short” regions of the polyprotein that comprise multiple epitopes and is preferably less in length than an entire native antigen. This relatively short sequence that contains multiple distinct, even overlapping, epitopes is selected and used to generate a minigene construct. The construct is engineered to express the peptide, which corresponds to the native protein sequence. The “relatively short” peptide is generally less than 1000, 500, or 250 amino acids in length, often less than 100 amino acids in length, preferably less than 75 amino acids in length, and more preferably less than 50 amino acids in length. The protein sequence of the vaccine composition is selected because it has maximal number of epitopes contained within the sequence, i.e., it has a high concentration of epitopes. As noted herein, epitope motifs may be nested or overlapping (i.e., frame shifted relative to one another). For example, with frame shifted overlapping epitopes, two 9-mer epitopes and one 10-mer epitope can be present in a 10 amino acid peptide. Such a vaccine composition is administered for therapeutic or prophylactic purposes.

[0426] The vaccine composition will preferably include, for example, three CTL epitopes and at least one HTL epitope from TAAs. This polyepitopic native sequence is administered either as a peptide or as a nucleic acid sequence which encodes the peptide. Alternatively, an analog can be made of this native sequence, whereby one or more of the epitopes comprise substitutions that alter the cross-reactivity and/or binding affinity properties of the polyepitopic peptide.

[0427] The embodiment of this example provides for the possibility that an as yet undiscovered aspect of immune system processing will apply to the native nested sequence and thereby facilitate the production of therapeutic or prophylactic immune response-inducing vaccine compositions. Additionally such an embodiment provides for the possibility of motif-bearing epitopes for an HLA makeup that is presently unknown. Furthermore, this embodiment (absent analogs) directs the immune response to multiple peptide sequences that are actually present in native TAAs thus avoiding the need to evaluate any junctional epitopes. Lastly, the embodiment provides an economy of scale when producing nucleic acid vaccine compositions.

[0428] Related to this embodiment, computer programs can be derived in accordance with principles in the art, which identify in a target sequence, the greatest number of epitopes per sequence length.

### Example 15

[0429] Polyepitopic Vaccine Compositions Directed to Multiple Tumors

[0430] The HER2/neu peptide epitopes of the present invention are used in conjunction with peptide epitopes from other target tumor antigens to create a vaccine composition that is useful for the treatment of various types of tumors. For example, a set of TAA epitopes can be selected that allows the targeting of most common epithelial tumors (see, e.g., Kawashima et al., Hum. Immunol. 59:1-14, 1998). Such a composition includes epitopes from CEA, HER-2/neu, and MAGE2/3, all of which are expressed to appreciable degrees (20-60%) in frequently found tumors such as lung, breast, and gastrointestinal tumors.

[0431] The composition can be provided as a single polypeptide that incorporates the multiple epitopes from the various TAAs, or can be administered as a composition comprising one or more discrete epitopes. Alternatively, the vaccine can be administered as a minigene construct or as dendritic cells which have been loaded with the peptide epitopes in vitro.

[0432] Targeting multiple tumor antigens is also important to provide coverage of a large fraction of tumors of any particular type. A single TAA is rarely expressed in the majority of tumors of a given type. For example, approximately 50% of breast tumors express CEA, 20% express MAGE3, and 30% express HER-2/neu. Thus, the use of a single antigen for immunotherapy would offer only limited patient coverage. The combination of the three TAAs, however, would address approximately 70% of breast tumors. A vaccine composition comprising epitopes from multiple tumor antigens also reduces the potential for escape mutants due to loss of expression of an individual tumor antigen.

### Example 16

[0433] Use of Peptides to Evaluate an Immune Response

[0434] Peptides of the invention may be used to analyze an immune response for the presence of specific CTL or HTL populations directed to a TAA. Such an analysis may be performed using multimeric complexes as described, e.g., by Ogg et al., Science 279:2103-2106, 1998 and Greten et al., Proc. Natl. Acad. Sci. USA 95:7568-7573, 1998. In the following example, peptides in accordance with the invention are used as a reagent for diagnostic or prognostic purposes, not as an immunogen.

[0435] In this example, highly sensitive human leukocyte antigen tetrameric complexes (“tetramers”) are used for a cross-sectional analysis of, for example, tumor-associated antigen HLA-A*0201-specific CTL frequencies from HLA A*0201-positive individuals at different stages of disease or following immunization using a TAA peptide containing an A*0201 motif. Tetrameric complexes are synthesized as described (Musey et al., N. Engl. J. Med. 337:1267, 1997). Briefly, purified HLA heavy chain (A*0201 in this example) and β2-microglobulin are synthesized by means of a prokaryotic expression system. The heavy chain is modified by deletion of the transmembrane-cytosolic tail and COOH-terminal addition of a sequence containing a BirA enzymatic biotinylation site. The heavy chain, β2-microglobulin, and peptide are refolded by dilution. The 45-kD refolded product is isolated by fast protein liquid chromatography and then biotinylated by BirA in the presence of biotin (Sigma, St. Louis, Mo.), adenosine 5′triphosphate and magnesium. Streptavidin-phycoerythrin conjugate is added in a 1:4 molar ratio, and the tetrameric product is concentrated to 1 mg/ml. The resulting product is referred to as tetramer-phycoerythrin.

[0436] For the analysis of patient blood samples, approximately one million PBMCs are centrifuged at 300 g for 5 minutes and resuspended in 50 μl of cold phosphate-buffered saline. Tri-color analysis is performed with the tetramer-phycoerythrin, along with anti-CD8-Tricolor, and anti-CD38. The PBMCs are incubated with tetramer and antibodies on ice for 30 to 60 min and then washed twice before formaldehyde fixation. Gates are applied to contain >99.98% of control samples. Controls for the tetramers include both A*0201-negative individuals and A*0201-positive uninfected donors. The percentage of cells stained with the tetramer is then determined by flow cytometry. The results indicate the number of cells in the PBMC sample that contain epitope-restricted CTLs, thereby readily indicating the extent of immune response to the TAA epitope, and thus the stage of tumor progression or exposure to a vaccine that elicits a protective or therapeutic response.

### Example 17

[0437] Use of Peptide Epitopes to Evaluate Recall Responses

[0438] The peptide epitopes of the invention are used as reagents to evaluate T cell responses, such as acute or recall responses, in patients. Such an analysis may be performed on patients who are in remission, have a tumor, or who have been vaccinated with a TAA vaccine.

[0439] For example, the class I restricted CTL response of persons who have been vaccinated may be analyzed. The vaccine may be any TAA vaccine. PBMC are collected from vaccinated individuals and HLA typed. Appropriate peptide epitopes of the invention that, optimally, bear supermotifs to provide cross-reactivity with multiple HLA supertype family members, are then used for analysis of samples derived from individuals who bear that HLA type.

[0440] PBMC from vaccinated individuals are separated on Ficoll-Histopaque density gradients (Sigma Chemical Co., St. Louis, Mo.), washed three times in HBSS (GIBCO Laboratories), resuspended in RPMI-1640 (GIBCO Laboratories) supplemented with L-glutamine (2 mM), penicillin (50U/ml), streptomycin (50 μg/ml), and Hepes (10 mM) containing 10% heat-inactivated human AB serum (complete RPMI) and plated using microculture formats. A synthetic peptide comprising an epitope of the invention is added at 10 μg/ml to each well and HBV core 128-140 epitope is added at 1 μg/ml to each well as a source of T cell help during the first week of stimulation.

[0441] In the microculture format, 4×10⁵ PBMC are stimulated with peptide in 8 replicate cultures in 96-well round bottom plate in 100 μl/well of complete RPMI. On days 3 and 10, 100 μl of complete RPMI and 20 U/ml final concentration of rIL-2 are added to each well. On day 7 the cultures are transferred into a 96-well flat-bottom plate and restimulated with peptide, rIL-2 and 10⁵ irradiated (3,000 rad) autologous feeder cells. The cultures are tested for cytotoxic activity on day 14. A positive CTL response requires two or more of the eight replicate cultures to display greater than 10% specific ⁵¹Cr release, based on comparison with uninfected control subjects as previously described (Rehermann, et al., Nature Med. 2:1104,1108, 1996; Rehermann et al., J. Clin. Invest. 97:1655-1665, 1996; and Rehermann et al. J. Clin. Invest. 98:1432-1440, 1996).

[0442] Target cell lines are autologous and allogeneic EBV-transformed B-LCL that are either purchased from the American Society for Histocompatibility and Immunogenetics (ASHI, Boston, Mass.) or established from the pool of patients as described (Guilhot, et al. J. Virol. 66:2670-2678, 1992).

[0443] Cytotoxicity assays are performed in the following manner. Target cells consist of either allogeneic HLA-matched or autologous EBV-transformed B lymphoblastoid cell line that are incubated overnight with the synthetic peptide epitope of the invention at 10 μM, and labeled with 100 μCi of ⁵¹Cr (Amersham Corp., Arlington Heights, Ill.) for 1 hour after which they are washed four times with HBSS.

[0444] Cytolytic activity is determined in a standard 4 hour, split-well ⁵¹Cr release assay using U-bottomed 96 well plates containing 3,000 targets/well. Stimulated PBMC are tested at effector/target (E/T) ratios of 20-50:1 on day 14. Percent cytotoxicity is determined from the formula: 100×[(experimental release−spontaneous release)/maximum release−spontaneous release)]. Maximum release is determined by lysis of targets by detergent (2% Triton X-100; Sigma Chemical Co., St. Louis, Mo.). Spontaneous release is <25% of maximum release for all experiments.

[0445] The results of such an analysis indicate the extent to which HLA-restricted CTL populations have been stimulated by previous exposure to the TAA or TAA vaccine.

[0446] The class II restricted HTL responses may also be analyzed. Purified PBMC are cultured in a 96-well flat bottom plate at a density of 1.5×10⁵ cells/well and are stimulated with 10 μg/ml synthetic peptide, whole antigen, or PHA. Cells are routinely plated in replicates of 4-6 wells for each condition. After seven days of culture, the medium is removed and replaced with fresh medium containing 10U/ml IL-2. Two days later, 1 μCi ³H-thymidine is added to each well and incubation is continued for an additional 18 hours. Cellular DNA is then harvested on glass fiber mats and analyzed for ³H-thymidine incorporation. Antigen-specific T cell proliferation is calculated as the ratio of ³H-thymidine incorporation in the presence of antigen divided by the ³H-thymidine incorporation in the absence of antigen.

### Example 18

[0447] Induction of Specific CTL Response in Humans

[0448] A human clinical trial for an immunogenic composition comprising CTL and HTL epitopes of the invention is set up as an IND Phase I, dose escalation study. Such a trial is designed, for example, as follows:

[0449] A total of about 27 subjects are enrolled and divided into 3 groups:

[0450] Group I: 3 subjects are injected with placebo and 6 subjects are injected with 5 μg of peptide composition;

[0451] Group II: 3 subjects are injected with placebo and 6 subjects are injected with 50 μg peptide composition;

[0452] Group III: 3 subjects are injected with placebo and 6 subjects are injected with 500 μg of peptide composition.

[0453] After 4 weeks following the first injection, all subjects receive a booster inoculation at the same dosage. Additional booster inoculations can be administered on the same schedule.

[0454] The endpoints measured in this study relate to the safety and tolerability of the peptide composition as well as its immunogenicity. Cellular immune responses to the peptide composition are an index of the intrinsic activity of the peptide composition, and can therefore be viewed as a measure of biological efficacy. The following summarize the clinical and laboratory data that relate to safety and efficacy endpoints.

[0455] Safety: The incidence of adverse events is monitored in the placebo and drug treatment group and assessed in terms of degree and reversibility.

[0456] Evaluation of Vaccine Efficacy: For evaluation of vaccine efficacy, subjects are bled before and after injection. Peripheral blood mononuclear cells are isolated from fresh heparinized blood by Ficoll-Hypaque density gradient centrifugation, aliquoted in freezing media and stored frozen. Samples are assayed for CTL and HTL activity.

[0457] The vaccine is found to be both safe and efficacious.

### Example 19

[0458] Therapeutic Use in Cancer Patients

[0459] Evaluation of vaccine compositions are performed to validate the efficacy of the CTL-HTL peptide compositions in cancer patients. The main objectives of the trials are to determine an effective dose and regimen for inducing CTLs in cancer patients, to establish the safety of inducing a CTL and HTL response in these patients, and to see to what extent activation of CTLs improves the clinical picture of cancer patients, as manifested by a reduction in tumor cell numbers. Such a study is designed, for example, as follows:

[0460] The studies are performed in multiple centers. The trial design is an open-label, uncontrolled, dose escalation protocol wherein the peptide composition is administered as a single dose followed six weeks later by a single booster shot of the same dose. The dosages are 50, 500 and 5,000 micrograms per injection. Drug-associated adverse effects (severity and reversibility) are recorded.

[0461] There are three patient groupings. The first group is injected with 50 micrograms of the peptide composition and the second and third groups with 500 and 5,000 micrograms of peptide composition, respectively. The patients within each group range in age from 21-65, include both males and females (unless the tumor is sex-specific, e.g., breast or prostate cancer), and represent diverse ethnic backgrounds.

### Example 20

[0462] Induction of CTL Responses Using a Prime Boost Protocol

[0463] A prime boost protocol similar in its underlying principle to that used to evaluate the efficacy of a DNA vaccine in transgenic mice, which was described in Example 12, can also be used for the administration of the vaccine to humans. Such a vaccine regimen may include an initial administration of, for example, naked DNA followed by a boost using recombinant virus encoding the vaccine, or recombinant protein/polypeptide or a peptide mixture administered in an adjuvant.

[0464] For example, the initial immunization can be performed using an expression vector, such as that constructed in Example 11, in the form of naked nucleic acid administered IM (or SC or ID) in the amounts of 0.5-5 mg at multiple sites. The nucleic acid (0.1 to 1000 μg) can also be administered using a gene gun. Following an incubation period of 3-4 weeks, a booster dose is then administered. The booster can be recombinant fowlpox virus administered at a dose of 5-10⁷ to 5×10⁹ pfu. An alternative recombinant virus, such as an MVA, canarypox, adenovirus, or adeno-associated virus, can also be used for the booster, or the polyepitopic protein or a mixture of the peptides can be administered. For evaluation of vaccine efficacy, patient blood samples will be obtained before immunization as well as at intervals following administration of the initial vaccine and booster doses of the vaccine. Peripheral blood mononuclear cells are isolated from fresh heparinized blood by Ficoll-Hypaque density gradient centrifugation, aliquoted in freezing media and stored frozen. Samples are assayed for CTL and HTL activity.

[0465] Analysis of the results will indicate that a magnitude of response sufficient to achieve protective immunity against cancer is generated.

### Example 21

[0466] Administration of Vaccine Compositions Using Dendritic Cells

[0467] Vaccines comprising peptide epitopes of the invention can be administered using antigen-presenting cells, or “professional” APCs such as dendritic cells. In this example, the peptide-pulsed DC are administered to a patient to stimulate a CTL response in vivo. In this method, dendritic cells are isolated, expanded, and pulsed with a vaccine comprising peptide CTL and HTL epitopes of the invention. The dendritic cells are infused back into the patient to elicit CTL and HTL responses in vivo. The induced lymphocytes then destroy or facilitate destruction of the specific target tumor cells that bear the proteins from which the epitopes in the vaccine are derived.

[0468] For example, a cocktail of epitope-bearing peptides is administered ex vivo to PBMC, or isolated DC therefrom, from the patient's blood. A pharmaceutical to facilitate harvesting of DC can be used, such as Progenipoietin™ (Monsanto, St. Louis, Mo.) or GM-CSF/IL4. After pulsing the DC with peptides and prior to reinfusion into patients, the DC are washed to remove unbound peptides.

[0469] As appreciated clinically, and readily determined by one of skill based on clinical outcomes, the number of dendritic cells reinfused into the patient can vary (see, e.g., Nature Med. 4:328, 1998; Nature Med. 2:52, 1996 and Prostate 32:272, 1997). Although 2-50×10⁶ dendritic cells per patient are typically administered, larger number of dendritic cells, such as 10⁷ or 10⁸ can also be provided. Such cell populations typically contain between 50-90% dendritic cells.

[0470] In some embodiments, peptide-loaded PBMC are injected into patients without purification of the DC. For example, PBMC containing DC generated after treatment with an agent such as Progenipoietin™ are injected into patients without purification of the DC. The total number of PBMC that are administered often ranges from 10⁸ to 10¹⁰. Generally, the cell doses injected into patients is based on the percentage of DC in the blood of each patient, as determined, for example, by immunofluorescence analysis with specific anti-DC antibodies. Thus, for example, if Progenipoietin™ mobilizes 2% DC in the peripheral blood of a given patient, and that patient is to receive 5×10⁶ DC, then the patient will be injected with a total of 2.5×10⁸ peptide-loaded PBMC. The percent DC mobilized by an agent such as Progenipoietin™ is typically estimated to be between 2-10%, but can vary as appreciated by one of skill in the art.

[0471] Ex Vivo Activation of CTL/HTL Responses

[0472] Alternatively, ex vivo CTL or HTL responses to a particular tumor-associated antigen can be induced by incubating in tissue culture the patient's, or genetically compatible, CTL or HTL precursor cells together with a source of antigen-presenting cells (APC), such as dendritic cells, and the appropriate immunogenic peptides. After an appropriate incubation time (typically about 7-28 days), in which the precursor cells are activated and expanded into effector cells, the cells are infused back into the patient, where they will destroy (CTL) or facilitate destruction (HTL) of their specific target cells, i.e., tumor cells.

### Example 22

[0473] Alternative Method of Identifying Motif-Bearing Peptides

[0474] Another way of identifying motif-bearing peptides is to elute them from cells bearing defined MHC molecules. For example, EBV transformed B cell lines used for tissue typing, have been extensively characterized to determine which HLA molecules they express. In certain cases these cells express only a single type of HLA molecule. These cells can then be infected with a pathogenic organism or transfected with nucleic acids that express the tumor antigen of interest. Thereafter, peptides produced by endogenous antigen processing of peptides produced consequent to infection (or as a result of transfection) will bind to HLA molecules within the cell and be transported and displayed on the cell surface.

[0475] The peptides are then eluted from the HLA molecules by exposure to mild acid conditions and their amino acid sequence determined, e.g., by mass spectral analysis (e.g., Kubo et al., J. Immunol. 152:3913, 1994). Because, as disclosed herein, the majority of peptides that bind a particular HLA molecule are motif-bearing, this is an alternative modality for obtaining the motif-bearing peptides correlated with the particular HLA molecule expressed on the cell.

[0476] Alternatively, cell lines that do not express any endogenous HLA molecules can be transfected with an expression construct encoding a single HLA allele. These cells may then be used as described, i.e., they may be infected with a pathogenic organism or transfected with nucleic acid encoding an antigen of interest to isolate peptides corresponding to the pathogen or antigen of interest that have been presented on the cell surface. Peptides obtained from such an analysis will bear motif(s) that correspond to binding to the single HLA allele that is expressed in the cell.

[0477] As appreciated by one in the art, one can perform a similar analysis on a cell bearing more than one HLA allele and subsequently determine peptides specific for each HLA allele expressed. Moreover, one of skill would also recognize that means other than infection or transfection, such as loading with a protein antigen, can be used to provide a source of antigen to the cell.

[0478] The above examples are provided to illustrate the invention but not to limit its scope. For example, the human terminology for the Major Histocompatibility Complex, namely HLA, is used throughout this document. It is to be appreciated that these principles can be extended to other species as well. Thus, other variants of the invention will be readily apparent to one of ordinary skill in the art and are encompassed by the appended claims. All publications, patents, and patent application cited herein are hereby incorporated by reference for all purposes.

TABLE I

| | | | POSITION |
|---|---|---|---|
| | POSITION | POSITION | C Terminus |
| | 2 (Primary Anchor) | 3 (Primary Anchor) | (Primary Anchor) |
| SUPER- | | | |
| MOTIFS | | | |
| A1 | T, I, L, V, M, S | | F, W, Y |
| A2 | L, I, V, M, A, T, | | I, V, M, A, T, L |
| | Q | | |
| A3 | V, S, M, A, T, L, | | R, K |
| | I | | |
| A24 | Y, F, W, I, V, L, | | F, I, Y, W, L, M |
| | M, T | | |
| B7 | P | | V, I, L, F, M, W, |
| | | | Y, A |
| B27 | R, H, K | | F, Y, L, W, M, I, |
| | | | V, A |
| B44 | E, D | | F, W, L, I, M, V, |
| | | | A |
| B58 | A, T, S | | F, W, Y, L, I, V, |
| | | | M, A |
| B62 | Q, L, I, V, M, P | | F, W, Y, M, I, V, |
| | | | L, A |
| MOTIFS | | | |
| A1 | T, S, M | | Y |
| A1 | | D, E, A, S | Y |
| A2.1 | L, M, V, Q, I, A, | | V, L, I, M, A, T |
| | T | | |
| A3 | L, M, V, I, S, A, | | K, Y, R, H, F, A |
| | T, F, C, G, D | | |
| A11 | V, T, M, L, I, S, | | K, R, Y, H |
| | A, G, N, C, D, F | | |
| A24 | Y, F, W, M | | F, L, I, W |
| A*3101 | M, V, T, A, L, I, | | R, K |
| | S | | |
| A*3301 | M, V, A, L, F, I, | | R, K |
| | S, T | | |
| A*6801 | A, V, T, M, S, L, | | R, K |
| | I | | |
| B*0702 | P | | L, M, F, W, Y, A, |
| | | | I, V |
| B*3501 | P | | L, M, F, W, Y, I, |
| | | | V, A |
| B51 | P | | L, I, V, F, W, Y, |
| | | | A, M |
| B*5301 | P | | I, M, F, W, Y, A, |
| | | | L, V |
| B*5401 | P | | A, T, I, V, L, M, |
| | | | F, W, Y |

Bolded residues are preferred, italicized residues are less preferred: A peptide is considered motif-bearing if it has primary anchors at each primary anchor position for a motif or supermotif as specified in the above table.

[0479] TABLE II

| | | POSITION | | | |
|---|---|---|---|---|---|
| | | [symbol] | [symbol] | [symbol] | [symbol] |
| SUPER- | | | | | |
| MOTIFS | | | | | |
| A1 | | | 1° Anchor | | |
| | | | \overline{T,I,L,V,M,S} | | |
| A2 | | | 1° Anchor | | |
| | | | L,I,V,M,A, | | |
| | | | T,Q | | |
| A3 | preferred | | 1° Anchor | Y,F,W,(4/5) | |
| | | | V,S,M,A,T, | | |
| | | | L,I | | |
| | deleterious | D,E (3/5); P,(5/5) | | D,E,(4/5) | |
| A24 | | | 1° Anchor | | |
| | | | Y,F,W,I,V, | | |
| | | | L,M,T | | |
| B7 | preferred | F,W,Y (5/5) | 1° Anchor | F,W,Y (4/5) | |
| | | L,I,V,M,(3/5) | P | | |
| | deleterious | D,E (3/5); P(5/5); | | | |
| | | G(4/5); A(3/5); | | | |
| | | Q,N,(3/5) | | | |
| B27 | | | 1° Anchor | | |
| | | | R,H,K | | |
| B44 | | | 1° Anchor | | |
| | | | E,D | | |
| B58 | | | 1° Anchor | | |
| | | | A,T,S | | |
| B62 | | | 1° Anchor | | |
| | | | Q,L,I,V,M, | | |
| | | | P | | |
| MOTIFS | | | | | |
| A1 | preferred | G,F,Y,W, | 1° Anchor | D,E,A, | Y,F,W, |
| 9-mer | | | S,T,M, | | |
| | deleterious | D,E, | | R,H,K,L,I,V | A, |
| | | | | M,P, | |
| A1 | preferred | G,R,H,K | A,S,T,C,L,I | 1° Anchor | G,S,T,C, |
| 9-mer | | | V,M, | D,E,A,S | |
| | deleterious | A | R,H,K,D,E, | | D,E, |
| | | | P,Y,F,W, | | |

| | | POSITION | | | | |
|---|---|---|---|---|---|---|
| | | [symbol] | [symbol] | [symbol] | [symbol] | C-terminus |
| SUPER- | | | | | | |
| MOTIFS | | | | | | |
| A1 | | | | | | 1° Anchor |
| | | | | | | F,W,Y |
| A2 | | | | | | 1° Anchor |
| | | | | | | \overline{L,I,V,M,A,T} |
| A3 | preferred | | Y,F,W, | Y,F,W,(4/5) | P,(4/5) | 1° Anchor |
| | | | (3/5) | | | R,K |
| | deleterious | | | | | |
| A24 | | | | | | 1° Anchor |
| | | | | | | \overline{F,I,Y,W,L,M} |
| B7 | preferred | | | | F,W,Y, | 1° Anchor |
| | | | | | (3/5) | \overline{V,I,L,F,M,W,Y,A} |
| | deleterious | D,E,(3/5) | G,(4/5) | Q,N,(4/5) | D,E,(4/5) | |
| B27 | | | | | | 1° Anchor |
| | | | | | | \overline{F,Y,L,W,M,V,A} |
| B44 | | | | | | 1° Anchor |
| | | | | | | \overline{F,W,Y,L,I,M,V,A} |
| B58 | | | | | | 1° Anchor |
| | | | | | | \overline{F,W,Y,L,I,V,M,A} |
| B62 | | | | | | 1° Anchor |
| | | | | | | \overline{F,W,Y,M,I,V,L,A} |
| MOTIFS | | | | | | |
| A1 | preferred | | P, | D,E,Q,N, | Y,F,W, | 1° Anchor |
| 9-mer | | | | | | Y |
| | deleterious | G, | A, | | | |
| A1 | preferred | | A,S,T,C, | L,I,V,M, | D,E, | 1° Anchor |
| 9-mer | | | | | | Y |
| | deleterious | P,Q,N, | R,H,K, | P,G, | G,P, | |

| | | POSITION | | | | |
|---|---|---|---|---|---|---|
| | | [symbol] | [symbol] | [symbol] | [symbol] | [symbol] |
| A1 | preferred | Y,F,W, | 1° Anchor | D,E,A,Q,N, | A, | Y,F,W,Q,N, |
| 10-mer | | | S,T,M | | | |
| | deleterious | G,P, | | R,H,K,G,L,I | D,E, | R,H,K, |
| | | | | V,M, | | |
| A1 | preferred | Y,F,W, | S,T,C,L,I,V | 1° Anchor | A, | Y,F,W, |
| 10-mer | | | M, | D,E,A,S | | |
| | deleterious | R,H,K, | R,H,K,D,E, | | | P, |
| | | | P,Y,F,W, | | | |
| A2.1 | preferred | Y,F,W, | 1° Anchor | Y,F,W, | S,T,C, | Y,F,W, |
| 9-mer | | | L,M,I,V,Q, | | | |
| | | | A,T | | | |
| | deleterious | D,E,P, | | D,E,R,K,H | | |
| A2.1 | preferred | A,Y,F,W, | 1° Anchor | L,V,I,M, | G, | |
| 10-mer | | | L,M,I,V,Q, | | | |
| | | | A,T | | | |
| | deleterious | D,E,P, | | D,E, | R,K,H,A, | P, |
| A3 | preferred | R,H,K, | 1° Anchor | Y,F,W, | P,R,H,K,Y, | A, |
| | | | L,M,V,I,S, | | F,W, | |
| | | | A,T,F,C,G, | | | |
| | | | D | | | |
| | deleterious | D,E,P, | | D,E | | |
| A11 | preferred | A, | 1° Anchor | Y,F,W, | Y,F,W, | A, |
| | | | V,T,L,M,I, | | | |
| | | | S,A,G,N,C, | | | |
| | | | D,F | | | |
| | deleterious | D,E,P, | | | | |
| A24 | preferred | Y,F,W,R,H,K, | 1° Anchor | | S,T,C | |
| 9-mer | | | Y,F,W,M | | | |
| | deleterious | D,E,G, | | D,E, | G, | Q,N,P, |
| A24 | preferred | | 1° Anchor | | P, | Y,F,W,P, |
| 10-mer | | | Y,F,W,M | | | |
| | deleterious | | | G,D,E | Q,N | R,H,K |
| A3101 | preferred | R,H,K, | 1° Anchor | Y,F,W, | P, | |
| | | | M,V,T,A,L, | | | |
| | | | I,S | | | |
| | deleterious | D,E,P, | | D,E, | | A,D,E, |
| A3301 | preferred | | 1° Anchor | Y,F,W | | |
| | | | M,V,A,L,F, | | | |
| | | | I,S,T | | | |
| | deleterious | G,P | | D,E | | |
| A6801 | preferred | Y,F,W,S,T,C, | 1° Anchor | | | Y,F,W,L,I, |
| | | | A,V,T,M,S, | | | V,M |
| | | | L,I | | | |
| | deleterious | G,P, | | D,E,G, | | R,H,K, |
| B0702 | preferred | R,H,K,F,W,Y, | 1° Anchor | R,H,K, | | |
| | | | P | | | |
| | deleterious | D,E,Q,N,P, | | D,E,P, | D,E, | D,E, |
| B3501 | preferred | F,W,Y,L,I,V,M, | 1° Anchor | F,W,Y, | | |
| | | | P | | | |
| | deleterious | A,G,P, | | | | G, |
| B51 | preferred | L,I,V,M,F,W,Y, | 1° Anchor | F,W,Y, | S,T,C, | F,W,Y, |
| | | | P | | | |
| | deleterious | A,G,P,D,E,R,H,K, | | | | DE, |
| | | S,T,C, | | | | |
| B5301 | preferred | L,I,V,M,F,W,Y, | 1° Anchor | F,W,Y, | S,T,C, | F,W,Y, |
| | | | P | | | |
| | deleterious | A,G,P,Q,N, | | | | |
| B5401 | preferred | F,W,Y, | 1° Anchor | F,W,Y,L,I,V, | | L,I,V,M, |
| | | | P | M, | | |
| | deleterious | G,P,Q,N,D,E, | | G,D,E,S,T,C, | | R,H,K,D,E, |

| | | POSITION | | | | |
|---|---|---|---|---|---|---|
| | | | | | [symbol] | |
| | | | | | or | |
| | | [symbol] | [symbol] | [symbol] | C-terminus | C-terminus |
| A1 | preferred | | P,A,S,T,C, | G,D,E, | P, | 1° Anchor |
| 10-mer | | | | | | Y |
| | deleterious | Q,N,A | R,H,K,Y,F, | R,H,K, | A | |
| | | | W, | | | |
| A1 | preferred | | P,G, | G, | Y,F,W, | 1° Anchor |
| 10-mer | | | | | | Y |
| | deleterious | G, | | P,R,H,K, | Q,N, | |
| A2.1 | preferred | | A, | P | 1° Anchor | |
| 9-mer | | | | | \overline{V,L,I,M,A,T} | |
| | deleterious | R,K,H | D,E,R,K,H | | | |
| A2.1 | preferred | G, | | F,Y,W,L, | | 1° Anchor |
| 10-mer | | | | V,I,M, | | \overline{V,L,I,M,A,T} |
| | deleterious | | R,K,H, | D,E,R,K, | R,K,H, | |
| | | | | H, | | |
| A3 | preferred | Y,F,W, | | P, | 1° Anchor | |
| | | | | | \overline{K,Y,R,H,F,A} | |
| | deleterious | | | | | |
| A11 | preferred | Y,F,W, | Y,F,W, | P, | 1° Anchor | |
| | | | | | K,,RY,H | |
| | deleterious | | A | G | | |
| A24 | preferred | | Y,F,W, | Y,F,W, | 1° Anchor | |
| 9-mer | | | | | F,L,I,W | |
| | deleterious | D,E,R,H,K, | G, | A,Q,N, | | |
| A24 | preferred | | P, | | | 1° Anchor |
| 10-mer | | | | | | F,L,I,W |
| | deleterious | D,E | A | Q,N, | D,E,A, | |
| A3101 | preferred | Y,F,W, | Y,F,W, | A,P, | 1° Anchor | |
| | | | | | R,K | |
| | deleterious | D,E, | D,E, | D,E, | | |
| A3301 | preferred | | A,Y,F,W | | 1° Anchor | |
| | | | | | R,K | |
| | deleterious | | | | | |
| A6801 | preferred | | Y,F,W, | P, | 1° Anchor | |
| | | | | | R,K | |
| | deleterious | | | A, | | |
| B0702 | preferred | R,H,K, | R,H,K, | R,H,K, | P,A, | 1° Anchor |
| | | | | | | \overline{L,M,F,W,Y,A,} |
| | | | | | | I,V |
| | deleterious | G,D,E, | Q,N, | D,E, | | |
| B3501 | preferred | | F,W,Y, | | 1° Anchor | |
| | | | | | \overline{L,M,F,W,Y,I,} | |
| | | | | | V,A | |
| | deleterious | G, | | | | |
| B51 | preferred | | G, | F,W,Y, | 1° Anchor | |
| | | | | | L,I,V,F,W, | |
| | | | | | Y,A,M | |
| | deleterious | G, | D,E,Q,N, | G,D,E, | | |
| B5301 | preferred | | L,I,V,M,F, | F,W,Y, | 1° Anchor | |
| | | | W,Y, | | I,M,F,W,Y, | |
| | | | | | A,L,V | |
| | deleterious | G, | R,H,K,Q,N, | D,E, | | |
| B5401 | preferred | | A,L,I,V,M, | F,W,Y,A,P, | 1° Anchor | |
| | | | | | A,T,I,V,L, | |
| | | | | | M,F,W,Y | |
| | deleterious | D,E, | Q,N,D,G,E, | D,E, | | |

Italicized residues indicate less preferred or “tolerated” residues.
The information in Table II is specific for 9-mers unless otherwise specified.
Secondary anchor specificities are designated for each position independently.

[0480] TABLE III

| | | POSITION | | | | | | | | |
|---|---|---|---|---|---|---|---|---|---|---|
| MOTIFS | | [chemical structure] | [chemical structure] | [chemical structure] | [chemical structure] | [chemical structure] | [chemical structure] | [chemical structure] | [chemical structure] | [chemical structure] |
| DR4 | preferred | F, M, Y, L, I, | M, | T, | | I, | V, S, T, C, P, A, | M, H, | | M, H |
| | | V, W, | | | | | L, I, M, | | | |
| | deleterious | | | | W, | | | R, | | W, D, E |
| DR1 | preferred | M, F, L, I, V, | | | P, A, M, Q, | | V, M, A, T, S, P, | M, | | A, V, M |
| | | W, Y, | | | | | L, I, C, | | | |
| | deleterious | | C | C, H | F, D | C, W, D | | G, D, E, | D | |
| DR7 | preferred | M, F, L, I, V, | M, | W, | A, | | I, V, M, S, A, C, | M, | | I ,V |
| | | W, Y, | | | | | T, P, L, | | | |
| | deleterious | | C, | | G, | | | G, R, D, | N | G |

| | | |
|---|---|---|
| DR Supermotif | M, F, L, I, V, | V, M, S, T, A, C, |
| | W, Y, | P, L, I, |

| DR3 MOTIFS | [chemical structure] | [chemical structure] | [chemical structure] | [chemical structure] | [chemical structure] | [chemical structure] |
|---|---|---|---|---|---|---|
| motif a | L, I, V, M, F, | | | | | |
| preferred | Y, | | | D | | |
| motif b | L, I, V, M, F, | | | D, N, Q, E, | | |
| preferred | A, Y, | | | S, T | | K, R, H |

Italicized residues indicate less preferred or “tolerated” residues. Secondary anchor specificities are designated for each position independently.

[0481] TABLE IV
HLA Class I Standard Peptide Binding Affinity.

| | STANDARD | SEQUENCE | STANDARD BINDING |
|---|---|---|---|
| ALLELE | PEPTIDE | (SEQ ID NO:) | AFFINITY (nM) |
| A*0101 | 944.02 | YLEPAIAKY | 25 |
| A*0201 | 941.01 | FLPSDYFPSV | 5.0 |
| A*0202 | 941.01 | FLPSDYFPSV | 4.3 |
| A*0203 | 941.01 | FLPSDYFPSV | 10 |
| A*0205 | 941.01 | FLPSDYFPSV | 4.3 |
| A*0206 | 941.01 | FLPSDYFPSV | 3.7 |
| A*0207 | 941.01 | FLPSDYFPSV | 23 |
| A*6802 | 1072.34 | YVIKVSARV | 8.0 |
| A*0301 | 941.12 | KVFPYALINK | 11 |
| A*1101 | 940.06 | AVDLYHFLK | 6.0 |
| A*3101 | 941.12 | KVFPYALINK | 18 |
| A*3301 | 1083.02 | STLPETYVVRR | 29 |
| A*6801 | 941.12 | KVFPYALINIK | 8.0 |
| A*2402 | 979.02 | AYIDNYNKF | 12 |
| B*0702 | 1075.23 | APRTLVYLL | 5.5 |
| B*3501 | 1021.05 | FPFKYAAAF | 7.2 |
| B51 | 1021.05 | FPFKYAAAF | 5.5 |
| B*5301 | 1021.05 | FPFKYAAAF | 9.3 |
| B*5401 | 1021.05 | FPFKYAAAF | 10 |

[0482] TABLE V
HLA Class II Standard Peptide Binding Affinity.

| | | Stan- | | Binding |
|---|---|---|---|---|
| | Nomen- | dard | Sequence | Affinity |
| Allele | clature | Peptide | (SEQ ID NO:) | (nM) |
| DRB1*0101 | DR1 | 515.01 | PKYVKQNTLKLAT | 5.0 |
| DRB1*0301 | DR3 | 829.02 | YKTIAFDEEARR | 300 |
| DRB1*0401 | DR4w4 | 515.01 | PKYVKQNTLKLAT | 45 |
| DRB1*0404 | DR4w14 | 717.01 | YARFQSQTTLKQKT | 50 |
| DRB1*0405 | DR4w15 | 717.01 | YARFQSQTTLKQKT | 38 |
| DRB1*0701 | DR7 | 553.01 | QYIKANSKFIGITE | 25 |
| DRB1*0802 | DR8w2 | 553.01 | QYIKANSKFIGITE | 49 |
| DRB1*0803 | DR8w3 | 553.01 | QYIKANSKFIGITE | 1600 |
| DRB1*0901 | DR9 | 553.01 | QYIKANSKFIGITE | 75 |
| DRB1*1101 | DR5w11 | 553.01 | QYIKANSKFIGITE | 20 |
| DRB1*1201 | DR5w12 | 1200.05 | EALIHQLKINPYVLS | 298 |
| DRB1*1302 | DR6w19 | 650.22 | QYIKANAKFIGITE | 3.5 |
| DRB1*1501 | DR2w2β1 | 507.02 | GRTQDENPVVHFFKNIV | 9.1 |
| | | | TPRTPPP | |
| DRB3*0101 | DR52a | 511 | NGQIGNDPNRDIL | 470 |
| DRB4*0101 | DRw53 | 717.01 | YARFQSQTTLKQKT | 58 |
| DRB5*0101 | DR2w2β2 | 553.01 | QYIKANSKFIGITE | 20 |

[0483] TABLE VI

| HLA- | Allelle-specific HLA-supertype members | |
|---|---|---|
| supertype | Verified^{a} | Predicted^{b} |
| A1 | A*0101, A*2501, A*2601, | A*0102, A*2604, A*3601, |
| | A*2602, A*3201 | A*4301, A*8001 |
| A2 | A*0201, A*0202, A*0203, | A*0208, A*0210, A*0211, |
| | A*0204, A*0205, A*0206, | A*0212, A*0213 |
| | A*0207, A*0209, A*0214, | |
| | A*6802, A*6901 | |
| A3 | A*0301, A*1101, A*3101, | A*0302, A*1102, A*2603, |
| | A*3301, A*6801 | A*3302, A*3303, A*3401, |
| | | A*3402, A*6601, A*6602, |
| | | A*7401 |
| A24 | A*2301, A*2402, A*3001 | A*2403, A*2404, A*3002, |
| | | A*3003 |
| B7 | B*0702, B*0703, B*0704, | B*1511, B*4201, B*5901 |
| | B*0705, B*1508, B*3501, | |
| | B*3502, B*3503, B*3503, | |
| | B*3504, B*3505, B*3506, | |
| | B*3507, B*3508, B*5101, | |
| | B*5102, B*5103, B*5104, | |
| | B*5105, B*5301, B*5401, | |
| | B*5501, B*5502, B*5601, | |
| | B*5602, B*6701, B*7801 | |
| B27 | B*1401, B*1402, B*1509, | B*2701, B*2707, B*2708, |
| | B*2702, B*2703, B*2704, | B*3802, B*3903, B*3904, |
| | B*2705, B*2706, B*3801, | B*3905, B*4801, B*4802, |
| | B*3901 ,B*3902, B*7301 | B*1510, B*1518, B*1503 |
| B44 | B*1801, B*1802, B*3701, | B*4101, B*4501, B*4701, |
| | B*4402, B*4403, B*4404, | B*4901, B*5001 |
| | B*4001, B*4002, B*4006 | |
| B58 | B*5701, B*5702, B*5801, | |
| | B*5802, B*1516, B*1517 | |
| B62 | B*1501, B*1502, B*1513, | B*1301, B*1302, B*1504, |
| | B*5201 | B*1505, B*1506, B*1507, |
| | | B*1515, B*1520, B*1521, |
| | | B*1512, B*1514, B*1510 |

^{a}Verified alleles include alleles whose specificity has been determined by pooi sequencing analysis, peptide binding assays, or by analysis of the sequences of CTL epitopes.
^{b}Predicted alleles are alleles whose specificity is predicted on the basis of B and F pocket structure to overlap with the supertype specificity.

[0484] TABLE VII
HER2/NEU A01 Supermotif Peptides with Binding Data

| | No. of | |
|---|---|---|
| Position | Amino Acids | A*0101 |
| 66 | 8 | |
| 272 | 8 | |
| 732 | 8 | |
| 899 | 8 | |
| 296 | 8 | 0.1000 |
| 916 | 8 | −0.0021 |
| 1241 | 8 | 0.0030 |
| 166 | 8 | |
| 369 | 8 | |
| 76 | 8 | |
| 434 | 8 | |
| 828 | 8 | −0.0021 |
| 945 | 8 | |
| 418 | 8 | |
| 1023 | 8 | |
| 2 | 8 | |
| 607 | 8 | |
| 402 | 8 | −0.0021 |
| 1016 | 8 | |
| 101 | 8 | |
| 479 | 8 | |
| 664 | 8 | |
| 724 | 8 | |
| 911 | 8 | |
| 1024 | 8 | |
| 1180 | 8 | |
| 603 | 8 | |
| 796 | 8 | |
| 952 | 8 | |
| 357 | 8 | |
| 892 | 8 | |
| 962 | 8 | |
| 997 | 8 | |
| 818 | 8 | |
| 906 | 8 | |
| 165 | 9 | |
| 356 | 9 | |
| 478 | 9 | |
| 910 | 9 | |
| 104 | 9 | 0.1800 |
| 401 | 9 | 0.0430 |
| 1131 | 9 | 0.1300 |
| 100 | 9 | |
| 373 | 9 | |
| 1023 | 9 | |
| 444 | 9 | |
| 513 | 9 | |
| 42 | 9 | 9.100 |
| 546 | 9 | 0.0050 |
| 795 | 9 | 0.0024 |
| 869 | 9 | 7.6000 |
| 1119 | 9 | 0.0017 |
| 271 | 9 | |
| 663 | 9 | |
| 1179 | 9 | |
| 295 | 9 | 0.0042 |
| 978 | 9 | |
| 197 | 9 | |
| 281 | 9 | 0.0028 |
| 773 | 9 | 0.0400 |
| 915 | 9 | 0.0011 |
| 417 | 9 | |
| 608 | 9 | |
| 293 | 9 | 0.0550 |
| 727 | 9 | 0.0011 |
| 997 | 9 | 0.0290 |
| 1213 | 9 | 0.0430 |
| 525 | 10 | |
| 406 | 10 | |
| 443 | 10 | |
| 899 | 10 | 2.7000 |
| 1239 | 10 | 0.0630 |
| 467 | 10 | |
| 960 | 10 | |
| 154 | 10 | 0.0300 |
| 64 | 10 | |
| 270 | 10 | |
| 391 | 10 | |
| 607 | 10 | |
| 662 | 10 | |
| 890 | 10 | |
| 160 | 10 | |
| 473 | 10 | |
| 816 | 10 | |
| 265 | 10 | 0.0015 |
| 402 | 10 | 1.1000 |
| 868 | 10 | 1.3000 |
| 914 | 10 | 0.0082 |
| 1130 | 10 | 0.0072 |
| 355 | 10 | |
| 722 | 10 | |
| 909 | 10 | |
| 904 | 10 | |
| 950 | 10 | |
| 55 | 10 | 0.0180 |
| 545 | 10 | 0.0015 |
| 772 | 10 | 1.1000 |
| 826 | 10 | 0.3000 |
| 249 | 10 | |
| 372 | 10 | |
| 1077 | 10 | |
| 280 | 10 | 0.1800 |
| 334 | 10 | 0.0016 |
| 601 | 10 | 0.0010 |
| 1213 | 10 | 5.5000 |
| 40 | 11 | 0.2800 |
| 401 | 11 | 0.4400 |
| 1102 | 11 | 0.0160 |
| 405 | 11 | |
| 98 | 11 | |
| 466 | 11 | |
| 661 | 11 | |
| 442 | 11 | |
| 73 | 11 | |
| 153 | 11 | |
| 725 | 11 | |
| 476 | 11 | |
| 54 | 11 | |
| 793 | 11 | |
| 1117 | 11 | |
| 281 | 11 | |
| 959 | 11 | |
| 1013 | 11 | 0.0027 |
| 854 | 11 | |
| 976 | 11 | |
| 195 | 11 | |
| 1213 | 11 | |
| 293 | 11 | 0.1900 |

[0485] TABLE VII
HER2/NEU A01 Supermotif Peptides with Binding Data

| | No. of | |
|---|---|---|
| Position | Amino Acids | A*0101 |
| 869 | 9 | 7.6000 |
| 1119 | 9 | 0.0017 |
| 271 | 9 | |
| 663 | 9 | |
| 1179 | 9 | |
| 295 | 9 | 0.0042 |
| 978 | 9 | |
| 197 | 9 | |
| 281 | 9 | 0.0028 |
| 773 | 9 | 0.0400 |
| 915 | 9 | 0.0011 |
| 417 | 9 | |
| 608 | 9 | |
| 293 | 9 | 0.0550 |
| 727 | 9 | 0.0011 |
| 997 | 9 | 0.0290 |
| 1213 | 9 | 0.0430 |
| 525 | 10 | |
| 406 | 10 | |
| 443 | 10 | |
| 899 | 10 | 2.7000 |
| 1239 | 10 | 0.0630 |
| 467 | 10 | |
| 960 | 10 | |
| 154 | 10 | 0.0300 |
| 64 | 10 | |
| 270 | 10 | |
| 391 | 10 | |
| 607 | 10 | |
| 662 | 10 | |
| 890 | 10 | |
| 160 | 10 | |
| 473 | 10 | |
| 816 | 10 | |
| 265 | 10 | 0.0015 |
| 402 | 10 | 1.1000 |
| 868 | 10 | 1.3000 |
| 914 | 10 | 0.0082 |
| 1130 | 10 | 0.0072 |
| 355 | 10 | |
| 722 | 10 | |
| 909 | 10 | |
| 904 | 10 | |
| 950 | 10 | |
| 55 | 10 | 0.0180 |
| 545 | 10 | 0.0015 |
| 772 | 10 | 1.1000 |
| 826 | 10 | 0.3000 |
| 249 | 10 | |
| 372 | 10 | |

[0486] TABLE VII
HER2/NEU A01 Supermotif Peptides with Binding Data

| | No. of | |
|---|---|---|
| Position | Amino Acids | A*0101 |
| 1077 | 10 | |
| 280 | 10 | 0.1800 |
| 334 | 10 | 0.0016 |
| 601 | 10 | 0.0010 |
| 1213 | 10 | 5.5000 |
| 40 | 11 | 0.2800 |
| 401 | 11 | 0.4400 |
| 1102 | 11 | 0.0160 |
| 405 | 11 | |
| 98 | 11 | |
| 466 | 11 | |
| 661 | 11 | |
| 442 | 11 | |
| 73 | 11 | |
| 153 | 11 | |
| 725 | 11 | |
| 476 | 11 | |
| 54 | 11 | |
| 793 | 11 | |
| 1117 | 11 | |
| 281 | 11 | |
| 959 | 11 | |
| 1013 | 11 | 0.0027 |
| 854 | 11 | |
| 976 | 11 | |
| 195 | 11 | |
| 1213 | 11 | |
| 293 | 11 | 0.1900 |

[0487] TABLE VIII
HER2/NEU A02 Supermotif with Binding Data

| | No. of | | | | | |
|---|---|---|---|---|---|---|
| Position | Amino Acids | A*0201 | A*0202 | A*0203 | A*0206 | A*6802 |
| 1094 | 8 | | | | | |
| 1094 | 10 | | | | | |
| 4 | 8 | | | | | |
| 4 | 9 | | | | | |
| 4 | 10 | 0.0010 | | | | |
| 4 | 11 | | | | | |
| 1203 | 10 | | | | | |
| 1159 | 8 | | | | | |
| 1159 | 9 | 0.0001 | | | | |
| 20 | 8 | | | | | |
| 20 | 10 | | | | | |
| 751 | 9 | | | | | |
| 113 | 11 | | | | | |
| 5 | 8 | | | | | |
| 5 | 9 | 0.0310 | | | | |
| 5 | 10 | 0.0360 | 0.0022 | 0.8600 | 0.0019 | 0.0160 |
| 5 | 11 | | | | | |
| 890 | 11 | | | | | |
| 466 | 9 | 0.0210 | | | | |
| 14 | 8 | | | | | |
| 14 | 10 | 0.0001 | | | | |
| 270 | 9 | 0.0001 | | | | |
| 705 | 8 | | | | | |
| 705 | 10 | 0.0007 | | | | |
| 705 | 11 | | | | | |
| 710 | 9 | | | | | |
| 710 | 11 | | | | | |
| 1165 | 8 | | | | | |
| 1165 | 9 | | | | | |
| 1190 | 8 | | | | | |
| 1190 | 9 | | | | | |
| 115 | 9 | 0.0004 | | | | |
| 355 | 11 | | | | | |
| 657 | 8 | | | | | |
| 657 | 9 | 0.0007 | | | | |
| 657 | 10 | 0.0002 | | | | |
| 657 | 11 | | | | | |
| 587 | 11 | | | | | |
| 224 | 8 | | | | | |
| 224 | 10 | | | | | |
| 338 | 8 | | | | | |
| 338 | 10 | 0.0011 | | | | |
| 255 | 9 | | | | | |
| 789 | 8 | | | | | |
| 789 | 9 | 0.0340 | | | | |
| 789 | 10 | | | | | |
| 826 | 8 | | | | | |
| 826 | 11 | | | | | |
| 623 | 9 | | | | | |
| 567 | 8 | | | | | |
| 567 | 9 | | | | | |
| 212 | 8 | | | | | |
| 212 | 10 | | | | | |
| 53 | 8 | | | | | |
| 53 | 10 | | | | | |
| 53 | 11 | | | | | |
| 244 | 10 | | | | | |
| 244 | 11 | | | | | |
| 26 | 8 | | | | | |
| 26 | 10 | | | | | |
| 630 | 8 | | | | | |
| 947 | 8 | | | | | |
| 947 | 9 | | | | | |
| 947 | 10 | | | | | |
| 596 | 9 | 0.0004 | | | | |
| 634 | 11 | | | | | |
| 540 | 8 | | | | | |
| 540 | 11 | | | | | |
| 504 | 11 | | | | | |
| 528 | 8 | | | | | |
| 295 | 10 | 0.0001 | | | | |
| 871 | 9 | | | | | |
| 171 | 9 | 0.0002 | | | | |
| 171 | 10 | | | | | |
| 171 | 11 | | | | | |
| 76 | 9 | 0.0001 | | | | |
| 76 | 10 | 0.0001 | | | | |
| 76 | 11 | | | | | |
| 845 | 8 | | | | | |
| 845 | 9 | 0.0002 | | | | |
| 636 | 9 | | | | | |
| 1089 | 10 | 0.0001 | | | | |
| 993 | 8 | | | | | |
| 993 | 11 | | | | | |
| 933 | 9 | 0.0002 | | | | |
| 821 | 9 | 0.0002 | | | | |
| 821 | 10 | | | | | |
| 421 | 8 | | | | | |
| 421 | 10 | 0.0003 | | | | |
| 421 | 11 | | | | | |
| 1016 | 9 | 0.0002 | | | | |
| 1016 | 10 | 0.0002 | | | | |
| 1013 | 8 | | | | | |
| 30 | 8 | | | | | |
| 1224 | 9 | | | | | |
| 483 | 10 | | | | | |
| 483 | 11 | | | | | |
| 165 | 8 | | | | | |
| 1183 | 8 | | | | | |
| 1183 | 9 | 0.0002 | | | | |
| 1084 | 9 | | | | | |
| 1084 | 11 | | | | | |
| 307 | 8 | | | | | |
| 307 | 11 | | | | | |
| 838 | 9 | 0.0002 | | | | |
| 838 | 10 | | | | | |
| 838 | 11 | | | | | |
| 904 | 8 | | | | | |
| 904 | 9 | 0.0002 | | | | |
| 950 | 11 | | | | | |
| 580 | 9 | | | | | |
| 1069 | 8 | | | | | |
| 770 | 8 | | | | | |
| 766 | 8 | | | | | |
| 766 | 9 | | | | | |
| 766 | 10 | | | | | |
| 147 | 8 | | | | | |
| 147 | 9 | 0.0001 | | | | |
| 405 | 8 | | | | | |
| 405 | 10 | | | | | |
| 2 | 10 | 0.0001 | | | | |
| 2 | 11 | | | | | |
| 460 | 8 | | | | | |
| 460 | 9 | 0.0004 | | | | |
| 265 | 8 | | | | | |
| 265 | 9 | | | | | |
| 139 | 8 | | | | | |
| 139 | 10 | | | | | |
| 139 | 11 | | | | | |
| 719 | 8 | | | | | |
| 61 | 9 | | | | | |
| 61 | 11 | | | | | |
| 695 | 11 | | | | | |
| 971 | 9 | 0.0001 | | | | |
| 971 | 10 | 0.0001 | | | | |
| 238 | 8 | | | | | |
| 395 | 8 | | | | | |
| 395 | 9 | | | | | |
| 645 | 8 | | | | | |
| 645 | 10 | | | | | |
| 645 | 11 | | | | | |
| 1123 | 9 | | | | | |
| 1123 | 10 | | | | | |
| 717 | 9 | | | | | |
| 717 | 10 | | | | | |
| 693 | 8 | | | | | |
| 693 | 9 | | | | | |
| 874 | 11 | | | | | |
| 40 | 10 | | | | | |
| 401 | 10 | | | | | |
| 79 | 8 | | | | | |
| 79 | 9 | | | | | |
| 352 | 8 | | | | | |
| 352 | 10 | | | | | |
| 321 | 8 | | | | | |
| 364 | 11 | | | | | |
| 376 | 11 | | | | | |
| 73 | 8 | | | | | |
| 534 | 8 | | | | | |
| 425 | 11 | | | | | |
| 476 | 10 | 0.0001 | | | | |
| 986 | 9 | 0.0002 | | | | |
| 1093 | 9 | 0.0001 | | | | |
| 1093 | 11 | | | | | |
| 1202 | 11 | | | | | |
| 19 | 9 | | | | | |
| 19 | 11 | | | | | |
| 621 | 8 | | | | | |
| 621 | 11 | | | | | |
| 729 | 10 | 0.0001 | | | | |
| 1080 | 11 | | | | | |
| 919 | 8 | | | | | |
| 919 | 10 | | | | | |
| 704 | 9 | 0.0002 | | | | |
| 704 | 11 | | | | | |
| 1231 | 10 | | | | | |
| 131 | 10 | 0.0001 | | | | |
| 1164 | 9 | | | | | |
| 1164 | 10 | 0.0002 | | | | |
| 1189 | 9 | 0.0002 | | | | |
| 1189 | 10 | | | | | |
| 439 | 10 | 0.0030 | | | | |
| 262 | 9 | | | | | |
| 262 | 10 | 0.0005 | | | | |
| 262 | 11 | | | | | |
| 787 | 8 | | | | | |
| 787 | 10 | 0.0004 | | | | |
| 787 | 11 | | | | | |
| 672 | 11 | | | | | |
| 660 | 8 | | | | | |
| 660 | 10 | 0.0007 | | | | |
| 660 | 11 | | | | | |
| 925 | 10 | 0.0001 | | | | |
| 925 | 11 | | | | | |
| 449 | 10 | 0.0003 | | | | |
| 737 | 10 | 0.0002 | | | | |
| 508 | 9 | 0.0120 | 0.0001 | 0.0790 | 0.0001 | 0.0044 |
| 464 | 9 | | | | | |
| 464 | 11 | | | | | |
| 865 | 8 | | | | | |
| 865 | 11 | | | | | |
| 1062 | 9 | | | | | |
| 447 | 9 | 0.0018 | | | | |
| 344 | 10 | 0.0017 | | | | |
| 10 | 11 | | | | | |
| 549 | 9 | | | | | |
| 136 | 10 | 0.0001 | | | | |
| 136 | 11 | | | | | |
| 454 | 8 | | | | | |
| 346 | 8 | | | | | |
| 346 | 10 | | | | | |
| 346 | 11 | | | | | |
| 1091 | 8 | | | | | |
| 1091 | 11 | | | | | |
| 832 | 8 | | | | | |
| 832 | 10 | 0.0017 | | | | |
| 832 | 11 | | | | | |
| 537 | 10 | | | | | |
| 537 | 11 | | | | | |
| 28 | 8 | | | | | |
| 28 | 10 | | | | | |
| 1239 | 11 | | | | | |
| 104 | 10 | | | | | |
| 104 | 11 | | | | | |
| 732 | 9 | | | | | |
| 776 | 10 | 0.0001 | | | | |
| 776 | 11 | | | | | |
| 603 | 9 | | | | | |
| 603 | 11 | | | | | |
| 152 | 10 | 0.0036 | | | | |
| 909 | 8 | | | | | |
| 909 | 9 | | | | | |
| 668 | 8 | | | | | |
| 1179 | 8 | | | | | |
| 878 | 9 | 0.0002 | | | | |
| 473 | 8 | | | | | |
| 42 | 8 | | | | | |
| 349 | 8 | | | | | |
| 349 | 9 | | | | | |
| 349 | 11 | | | | | |
| 48 | 8 | | | | | |
| 48 | 9 | 0.0340 | | | | |
| 490 | 8 | | | | | |
| 901 | 10 | | | | | |
| 901 | 11 | | | | | |
| 495 | 11 | | | | | |
| 478 | 8 | | | | | |
| 858 | 9 | 0.0002 | | | | |
| 858 | 10 | | | | | |
| 809 | 9 | 0.0002 | | | | |
| 86 | 9 | | | | | |
| 86 | 11 | | | | | |
| 829 | 8 | | | | | |
| 829 | 11 | | | | | |
| 654 | 8 | | | | | |
| 654 | 9 | 0.0005 | | | | |
| 654 | 10 | 0.0120 | | | | |
| 654 | 11 | | | | | |
| 767 | 8 | | | | | |
| 767 | 9 | 0.0210 | 0.0001 | 0.0024 | 0.0012 | 0.0003 |
| 767 | 11 | | | | | |
| 435 | 9 | 0.2100 | | | | |
| 435 | 10 | | | | | |
| 435 | 11 | | | | | |
| 673 | 10 | | | | | |
| 714 | 10 | 0.0001 | | | | |
| 148 | 8 | | | | | |
| 661 | 9 | 0.0020 | | | | |
| 661 | 10 | 0.0006 | | | | |
| 954 | 8 | | | | | |
| 361 | 10 | | | | | |
| 77 | 8 | | | | | |
| 77 | 9 | | | | | |
| 77 | 10 | | | | | |
| 77 | 11 | | | | | |
| 989 | 9 | | | | | |
| 861 | 9 | | | | | |
| 861 | 10 | | | | | |
| 406 | 9 | | | | | |
| 762 | 10 | | | | | |
| 369 | 9 | 0.1500 | | | | |
| 747 | 8 | | | | | |
| 747 | 9 | 0.0002 | | | | |
| 681 | 10 | 0.0001 | | | | |
| 681 | 11 | | | | | |
| 860 | 8 | | | | | |
| 860 | 10 | 0.0020 | | | | |
| 860 | 11 | | | | | |
| 32 | 10 | | | | | |
| 1171 | 10 | | | | | |
| 1171 | 11 | | | | | |
| 722 | 9 | | | | | |
| 724 | 10 | | | | | |
| 724 | 11 | | | | | |
| 753 | 11 | | | | | |
| 883 | 8 | | | | | |
| 883 | 9 | 0.0002 | | | | |
| 3 | 9 | | | | | |
| 3 | 10 | 0.0022 | | | | |
| 3 | 11 | | | | | |
| 846 | 8 | | | | | |
| 509 | 8 | | | | | |
| 253 | 11 | | | | | |
| 465 | 8 | | | | | |
| 465 | 10 | | | | | |
| 13 | 8 | | | | | |
| 13 | 9 | | | | | |
| 13 | 11 | | | | | |
| 179 | 8 | | | | | |
| 1075 | 11 | | | | | |
| 866 | 10 | | | | | |
| 114 | 10 | 0.0002 | | | | |
| 85 | 10 | 0.0001 | | | | |
| 183 | 9 | | | | | |
| 467 | 8 | | | | | |
| 467 | 11 | | | | | |
| 674 | 9 | | | | | |
| 154 | 8 | | | | | |
| 12 | 9 | 0.0008 | | | | |
| 12 | 10 | 0.0006 | | | | |
| 869 | 11 | | | | | |
| 1008 | 10 | 0.0001 | | | | |
| 1008 | 11 | | | | | |
| 934 | 8 | | | | | |
| 785 | 9 | | | | | |
| 785 | 10 | 0.0490 | | | | |
| 11 | 10 | 0.0054 | | | | |
| 11 | 11 | | | | | |
| 822 | 8 | | | | | |
| 822 | 9 | 0.0046 | | | | |
| 15 | 9 | 0.0007 | | | | |
| 15 | 11 | | | | | |
| 690 | 8 | | | | | |
| 690 | 11 | | | | | |
| 662 | 8 | | | | | |
| 662 | 9 | 0.0001 | | | | |
| 800 | 8 | | | | | |
| 800 | 11 | | | | | |
| 74 | 11 | | | | | |
| 691 | 10 | | | | | |
| 691 | 11 | | | | | |
| 445 | 9 | | | | | |
| 445 | 11 | | | | | |
| 547 | 9 | | | | | |
| 547 | 11 | | | | | |
| 140 | 9 | | | | | |
| 140 | 10 | | | | | |
| 392 | 8 | | | | | |
| 392 | 11 | | | | | |
| 96 | 10 | | | | | |
| 1109 | 9 | | | | | |
| 1109 | 10 | | | | | |
| 397 | 10 | | | | | |
| 397 | 11 | | | | | |
| 428 | 8 | | | | | |
| 428 | 9 | | | | | |
| 1131 | 10 | | | | | |
| 145 | 9 | | | | | |
| 145 | 10 | | | | | |
| 145 | 11 | | | | | |
| 181 | 11 | | | | | |
| 443 | 8 | | | | | |
| 443 | 11 | | | | | |
| 1197 | 8 | | | | | |
| 700 | 11 | | | | | |
| 215 | 11 | | | | | |
| 651 | 8 | | | | | |
| 651 | 9 | | | | | |
| 651 | 11 | | | | | |
| 790 | 8 | | | | | |
| 790 | 9 | | | | | |
| 790 | 11 | | | | | |
| 62 | 8 | | | | | |
| 62 | 10 | | | | | |
| 313 | 10 | 0.0002 | | | | |
| 313 | 11 | | | | | |
| 1017 | 8 | | | | | |
| 1017 | 9 | 0.0030 | | | | |
| 696 | 10 | | | | | |
| 696 | 11 | | | | | |
| 841 | 8 | | | | | |
| 841 | 11 | | | | | |
| 852 | 8 | | | | | |
| 852 | 10 | | | | | |
| 852 | 11 | | | | | |
| 972 | 8 | 0.0001 | | | | |
| 972 | 9 | 0.0001 | | | | |
| 796 | 11 | | | | | |
| 271 | 8 | | | | | |
| 663 | 8 | | | | | |
| 663 | 11 | | | | | |
| 774 | 9 | 0.0014 | | | | |
| 979 | 9 | 0.0001 | | | | |
| 979 | 10 | | | | | |
| 979 | 11 | | | | | |
| 953 | 8 | | | | | |
| 953 | 9 | 0.0051 | | | | |
| 45 | 11 | | | | | |
| 827 | 10 | | | | | |
| 916 | 11 | | | | | |
| 1042 | 11 | | | | | |
| 68 | 10 | 0.0001 | | | | |
| 360 | 11 | | | | | |
| 59 | 9 | | | | | |
| 59 | 11 | | | | | |
| 427 | 9 | | | | | |
| 427 | 10 | 0.0001 | | | | |
| 708 | 8 | | | | | |
| 708 | 11 | | | | | |
| 319 | 10 | | | | | |
| 177 | 8 | | | | | |
| 177 | 10 | | | | | |
| 89 | 8 | | | | | |
| 89 | 11 | | | | | |
| 388 | 10 | | | | | |
| 275 | 8 | | | | | |
| 471 | 9 | | | | | |
| 471 | 10 | | | | | |
| 758 | 10 | | | | | |
| 758 | 11 | | | | | |
| 125 | 8 | | | | | |
| 745 | 8 | | | | | |
| 745 | 10 | 0.0001 | | | | |
| 745 | 11 | | | | | |
| 850 | 10 | 0.0001 | | | | |
| 1158 | 8 | | | | | |
| 1158 | 9 | | | | | |
| 1158 | 10 | 0.0001 | | | | |
| 643 | 9 | 0.0001 | | | | |
| 643 | 10 | | | | | |
| 1211 | 10 | 0.0001 | | | | |
| 1162 | 11 | | | | | |
| 269 | 8 | | | | | |
| 269 | 10 | | | | | |
| 1035 | 8 | | | | | |
| 1035 | 9 | | | | | |
| 927 | 8 | | | | | |
| 927 | 9 | 0.0001 | | | | |
| 385 | 8 | | | | | |
| 36 | 8 | | | | | |
| 36 | 10 | 0.0001 | | | | |
| 36 | 11 | | | | | |
| 996 | 8 | | | | | |
| 945 | 9 | | | | | |
| 945 | 10 | | | | | |
| 945 | 11 | | | | | |
| 885 | 10 | | | | | |
| 885 | 11 | | | | | |
| 627 | 9 | 0.0002 | | | | |
| 627 | 11 | | | | | |
| 612 | 11 | | | | | |
| 1074 | 8 | | | | | |
| 999 | 10 | 0.0001 | | | | |
| 999 | 11 | | | | | |
| 316 | 8 | | | | | |
| 316 | 9 | | | | | |
| 122 | 8 | | | | | |
| 122 | 9 | | | | | |
| 122 | 11 | | | | | |
| 1156 | 8 | | | | | |
| 1156 | 10 | | | | | |
| 1156 | 11 | | | | | |
| 1119 | 10 | 0.0001 | | | | |
| 1119 | 11 | | | | | |
| 391 | 9 | 0.0002 | | | | |
| 95 | 8 | | | | | |
| 95 | 11 | | | | | |
| 1108 | 10 | | | | | |
| 1108 | 11 | | | | | |
| 1130 | 11 | | | | | |
| 699 | 8 | | | | | |
| 650 | 8 | | | | | |
| 650 | 9 | 0.0015 | | | | |
| 650 | 10 | 0.0003 | | | | |
| 159 | 8 | | | | | |
| 159 | 9 | | | | | |
| 159 | 10 | | | | | |
| 1135 | 11 | | | | | |
| 1205 | 8 | | | | | |
| 942 | 8 | | | | | |
| 942 | 10 | | | | | |
| 1147 | 11 | | | | | |
| 1026 | 11 | | | | | |
| 1241 | 9 | | | | | |
| 1241 | 11 | | | | | |
| 232 | 10 | | | | | |
| 232 | 11 | | | | | |
| 1102 | 8 | | | | | |
| 66 | 9 | | | | | |
| 525 | 11 | | | | | |
| 1116 | 9 | | | | | |
| 749 | 11 | | | | | |
| 128 | 10 | 0.0001 | | | | |
| 709 | 10 | | | | | |
| 828 | 9 | 0.0006 | | | | |
| 178 | 9 | | | | | |
| 160 | 8 | | | | | |
| 160 | 9 | 0.0001 | | | | |
| 106 | 8 | | | | | |
| 106 | 9 | 0.4600 | | | | |
| 106 | 10 | 0.0140 | 0.0065 | 1.1000 | 0.0170 | 0.5400 |
| 106 | 11 | | | | | |
| 484 | 9 | 0.0062 | | | | |
| 484 | 10 | 0.0003 | | | | |
| 484 | 11 | | | | | |
| 799 | 8 | | | | | |
| 799 | 9 | 0.0230 | 0.0044 | 0.0880 | 0.0052 | 0.0031 |
| 396 | 8 | | | | | |
| 396 | 11 | | | | | |
| 141 | 8 | | | | | |
| 141 | 9 | 0.0008 | | | | |
| 711 | 8 | | | | | |
| 711 | 10 | 0.0001 | | | | |
| 1027 | 10 | | | | | |
| 679 | 8 | | | | | |
| 679 | 9 | | | | | |
| 24 | 8 | | | | | |
| 24 | 10 | 0.0001 | | | | |
| 398 | 9 | | | | | |
| 398 | 10 | | | | | |
| 429 | 8 | | | | | |
| 93 | 9 | | | | | |
| 93 | 10 | 0.0001 | | | | |
| 90 | 10 | 0.0001 | | | | |
| 54 | 9 | 0.0001 | | | | |
| 54 | 10 | | | | | |
| 190 | 9 | 0.0001 | | | | |
| 647 | 8 | | | | | |
| 647 | 9 | 0.0002 | | | | |
| 647 | 11 | | | | | |
| 354 | 8 | | | | | |
| 434 | 10 | 0.0180 | | | | |
| 434 | 11 | | | | | |
| 713 | 8 | | | | | |
| 713 | 11 | | | | | |
| 100 | 8 | | | | | |
| 816 | 8 | | | | | |
| 868 | 8 | | | | | |
| 784 | 8 | | | | | |
| 784 | 10 | | | | | |
| 784 | 11 | | | | | |
| 689 | 8 | | | | | |
| 689 | 9 | 0.0910 | | | | |
| 34 | 8 | | | | | |
| 34 | 10 | 0.0001 | | | | |
| 940 | 9 | 0.0002 | | | | |
| 940 | 10 | | | | | |
| 98 | 8 | | | | | |
| 98 | 10 | 0.0001 | | | | |
| 840 | 8 | | | | | |
| 840 | 9 | 0.0001 | | | | |
| 978 | 10 | 0.0020 | | | | |
| 978 | 11 | | | | | |
| 678 | 9 | | | | | |
| 678 | 10 | | | | | |
| 92 | 8 | | | | | |
| 92 | 10 | | | | | |
| 92 | 11 | | | | | |
| 217 | 9 | | | | | |
| 340 | 8 | | | | | |
| 340 | 11 | | | | | |
| 545 | 11 | | | | | |
| 358 | 8 | | | | | |
| 656 | 8 | | | | | |
| 656 | 9 | | | | | |
| 656 | 10 | 0.0009 | | | | |
| 656 | 11 | | | | | |
| 413 | 10 | 0.0002 | | | | |
| 653 | 9 | 0.0720 | 0.0082 | 0.2900 | 0.0130 | 0.2700 |
| 653 | 10 | 0.0002 | | | | |
| 653 | 11 | | | | | |
| 893 | 8 | | | | | |
| 1007 | 8 | | | | | |
| 1007 | 11 | | | | | |
| 418 | 11 | | | | | |
| 1100 | 10 | 0.0059 | | | | |
| 457 | 9 | 0.0002 | | | | |
| 457 | 10 | | | | | |
| 457 | 11 | | | | | |
| 70 | 8 | | | | | |
| 70 | 11 | | | | | |
| 144 | 10 | 0.0150 | | | | |
| 144 | 11 | | | | | |
| 442 | 9 | 0.0003 | | | | |
| 214 | 8 | | | | | |
| 281 | 10 | | | | | |
| 819 | 9 | | | | | |
| 819 | 11 | | | | | |
| 532 | 10 | | | | | |
| 305 | 8 | | | | | |
| 305 | 9 | | | | | |
| 305 | 10 | 0.0001 | | | | |
| 1235 | 8 | | | | | |
| 1235 | 9 | | | | | |
| 1002 | 8 | | | | | |
| 22 | 8 | | | | | |
| 22 | 10 | | | | | |
| 1051 | 9 | | | | | |
| 1051 | 10 | | | | | |
| 1051 | 11 | | | | | |
| 792 | 9 | | | | | |
| 792 | 10 | | | | | |
| 423 | 8 | | | | | |
| 423 | 9 | 0.0017 | | | | |
| 573 | 9 | | | | | |
| 297 | 8 | | | | | |
| 297 | 10 | | | | | |
| 1242 | 8 | | | | | |
| 1242 | 10 | 0.0001 | | | | |
| 496 | 10 | | | | | |
| 389 | 9 | 0.0002 | | | | |
| 389 | 11 | | | | | |
| 948 | 8 | | | | | |
| 948 | 9 | 0.0005 | | | | |
| 402 | 9 | 0.0018 | | | | |
| 402 | 11 | | | | | |
| 1166 | 8 | | | | | |
| 1060 | 11 | | | | | |
| 182 | 10 | | | | | |
| 444 | 10 | 0.0011 | | | | |
| 1172 | 9 | 0.0002 | | | | |
| 1172 | 10 | 0.0001 | | | | |
| 312 | 11 | | | | | |
| 686 | 9 | | | | | |
| 686 | 11 | | | | | |
| 526 | 10 | | | | | |
| 105 | 9 | | | | | |
| 105 | 10 | | | | | |
| 105 | 11 | | | | | |
| 798 | 9 | | | | | |
| 798 | 10 | | | | | |
| 23 | 9 | | | | | |
| 23 | 11 | | | | | |
| 218 | 8 | | | | | |
| 1117 | 8 | | | | | |
| 793 | 8 | | | | | |
| 793 | 9 | | | | | |
| 911 | 10 | | | | | |
| 733 | 8 | | | | | |
| 750 | 10 | | | | | |
| 597 | 8 | | | | | |
| 988 | 10 | | | | | |
| 430 | 11 | | | | | |
| 116 | 8 | | | | | |
| 116 | 11 | | | | | |
| 725 | 9 | | | | | |
| 725 | 10 | 0.0007 | | | | |
| 666 | 8 | | | | | |
| 666 | 9 | 0.0005 | | | | |
| 666 | 10 | | | | | |
| 84 | 8 | | | | | |
| 84 | 11 | | | | | |
| 153 | 9 | 0.0290 | | | | |
| 546 | 10 | 0.0009 | | | | |
| 754 | 10 | | | | | |
| 851 | 9 | 0.0002 | | | | |
| 851 | 11 | | | | | |
| 773 | 10 | 0.0180 | | | | |
| 56 | 8 | | | | | |
| 56 | 10 | | | | | |
| 80 | 8 | | | | | |
| 794 | 8 | | | | | |
| 296 | 9 | | | | | |
| 296 | 11 | | | | | |
| 574 | 8 | | | | | |
| 129 | 9 | | | | | |
| 797 | 10 | | | | | |
| 797 | 11 | | | | | |
| 356 | 10 | | | | | |
| 910 | 8 | | | | | |
| 910 | 11 | | | | | |
| 272 | 11 | | | | | |
| 658 | 8 | | | | | |
| 658 | 9 | 0.0005 | | | | |
| 658 | 10 | 0.0009 | | | | |
| 987 | 8 | | | | | |
| 987 | 11 | | | | | |
| 1180 | 11 | | | | | |
| 665 | 9 | 0.3500 | 0.0001 | 0.0040 | 0.0086 | 0.0200 |
| 665 | 10 | 0.0027 | | | | |
| 665 | 11 | | | | | |
| 55 | 8 | | | | | |
| 55 | 9 | | | | | |
| 55 | 11 | | | | | |
| 664 | 10 | 0.0032 | | | | |
| 664 | 11 | | | | | |
| 739 | 8 | | | | | |
| 739 | 10 | | | | | |
| 452 | 10 | 0.0001 | | | | |
| 888 | 8 | | | | | |
| 411 | 9 | 0.0003 | | | | |
| 835 | 8 | | | | | |
| 1248 | 8 | | | | | |
| 64 | 8 | | | | | |
| 64 | 11 | | | | | |
| 303 | 10 | 0.0002 | | | | |
| 303 | 11 | | | | | |
| 1196 | 8 | | | | | |
| 1196 | 9 | 0.0001 | | | | |
| 409 | 11 | | | | | |
| 952 | 9 | 0.0230 | 0.0001 | 0.0160 | 0.0014 | 0.0400 |
| 952 | 10 | 0.0600 | 0.0004 | 0.0300 | 0.0190 | 0.0011 |
| 163 | 10 | | | | | |
| 50 | 11 | | | | | |
| 289 | 8 | | | | | |
| 289 | 9 | | | | | |
| 289 | 10 | | | | | |
| 685 | 10 | | | | | |
| 83 | 9 | 0.0005 | | | | |
| 772 | 11 | | | | | |
| 554 | 8 | | | | | |
| 781 | 8 | | | | | |
| 781 | 10 | 0.0004 | | | | |
| 781 | 11 | | | | | |

[0488] TABLE IX
HER2/NEU A03 Supermotif with Binding Data

| | No. of | | | | | |
|---|---|---|---|---|---|---|
| Position | Amino Acids | A*0301 | A*1101 | A*3101 | A*3301 | A*6801 |
| 241 | 8 | | | | | |
| 847 | 8 | | | | | |
| 1159 | 11 | | | | | |
| 890 | 8 | | | | | |
| 890 | 9 | 0.0013 | 0.0006 | | | |
| 492 | 8 | | | | | |
| 180 | 9 | 0.0004 | 0.0005 | | | |
| 180 | 11 | | | | | |
| 705 | 9 | 0.0004 | 0.0006 | | | |
| 37 | 11 | | | | | |
| 997 | 10 | 0.0003 | 0.0670 | 0.1200 | 0.0140 | 0.0520 |
| 240 | 9 | 0.0021 | 0.0021 | | | |
| 220 | 9 | −0.0002 | −0.0002 | | | |
| 805 | 10 | 0.0003 | 0.0001 | | | |
| 195 | 9 | −0.0008 | −0.0001 | | | |
| 26 | 9 | 0.0002 | 0.0005 | | | |
| 630 | 11 | | | | | |
| 947 | 11 | | | | | |
| 584 | 8 | | | | | |
| 596 | 10 | 0.0220 | 0.0042 | 0.0008 | 0.0064 | 0.0093 |
| 528 | 9 | 0.0015 | 0.0310 | 0.5300 | 0.5800 | 0.4400 |
| 845 | 10 | 0.0018 | 0.0007 | | | |
| 1089 | 8 | | | | | |
| 933 | 8 | | | | | |
| 821 | 11 | | | | | |
| 607 | 9 | 0.0005 | 0.0100 | 0.0002 | 0.0880 | 0.0310 |
| 962 | 9 | −0.0002 | −0.0002 | | | |
| 165 | 11 | | | | | |
| 1144 | 10 | 0.0003 | 0.0001 | | | |
| 950 | 8 | | | | | |
| 147 | 11 | | | | | |
| 930 | 8 | | | | | |
| 930 | 11 | | | | | |
| 914 | 8 | | | | | |
| 971 | 8 | | | | | |
| 971 | 11 | | | | | |
| 280 | 9 | 0.0003 | −0.0002 | | | |
| 207 | 11 | | | | | |
| 717 | 8 | | | | | |
| 874 | 10 | 0.0003 | 0.0001 | | | |
| 40 | 8 | | | | | |
| 321 | 10 | 0.0002 | 0.0001 | | | |
| 976 | 10 | −0.0002 | 0.0010 | | | |
| 729 | 8 | | | | | |
| 1038 | 9 | −0.0002 | 0.0043 | | | |
| 1038 | 11 | | | | | |
| 919 | 11 | | | | | |
| 704 | 10 | −0.0002 | 0.0041 | | | |
| 1231 | 8 | | | | | |
| 131 | 8 | | | | | |
| 1164 | 8 | | | | | |
| 672 | 10 | 0.0150 | 0.0014 | | | |
| 449 | 8 | | | | | |
| 449 | 11 | | | | | |
| 737 | 11 | | | | | |
| 508 | 10 | 0.0110 | 0.0001 | | | |
| 1062 | 11 | | | | | |
| 447 | 10 | 0.0037 | 0.0001 | | | |
| 344 | 8 | | | | | |
| 344 | 11 | | | | | |
| 549 | 10 | 0.0002 | 0.0003 | | | |
| 136 | 8 | | | | | |
| 346 | 9 | −0.0002 | −0.0002 | | | |
| 832 | 9 | −0.0002 | 0.0002 | | | |
| 1041 | 8 | | | | | |
| 727 | 10 | 0.0660 | 0.1300 | 0.0014 | −0.0013 | 0.0012 |
| 327 | 10 | 0.0210 | 0.6100 | 0.0140 | 0.0012 | 0.0100 |
| 776 | 9 | 0.0010 | 0.0066 | | | |
| 668 | 9 | 0.0047 | 0.0890 | 0.0019 | 0.0025 | 0.0011 |
| 668 | 10 | 0.0180 | 0.0330 | 0.0590 | 0.0140 | 0.4300 |
| 668 | 11 | | | | | |
| 878 | 10 | 0.0003 | 0.0008 | | | |
| 632 | 9 | −0.0002 | 0.0007 | | | |
| 478 | 10 | 0.0035 | 0.0720 | 0.9600 | 0.3300 | 2.0000 |
| 858 | 11 | | | | | |
| 809 | 8 | | | | | |
| 673 | 9 | 0.3800 | 0.0097 | 0.0760 | 0.0064 | 0.0001 |
| 673 | 11 | | | | | |
| 714 | 8 | | | | | |
| 714 | 9 | 0.0190 | 0.0023 | 0.0009 | 0.0010 | 0.0001 |
| 714 | 11 | | | | | |
| 148 | 10 | 0.0400 | 0.0005 | 0.7300 | 0.2400 | 0.0390 |
| 167 | 9 | 0.2800 | 0.3100 | 0.2200 | 0.0300 | 0.0046 |
| 450 | 10 | 0.0410 | 0.0027 | 2.6000 | 0.1300 | 0.1100 |
| 861 | 8 | | | | | |
| 747 | 10 | 0.0009 | 0.0099 | | | |
| 681 | 8 | 0.0010 | 0.0004 | | | |
| 681 | 9 | 0.7600 | 0.0018 | 1.1000 | 0.0072 | 0.0002 |
| 860 | 9 | 0.1700 | 0.2400 | 0.1800 | 0.0012 | 0.0049 |
| 753 | 10 | 0.3800 | 0.2200 | 0.0068 | 0.0012 | 0.0008 |
| 846 | 9 | 0.0580 | 0.0285 | −0.0005 | −0.0012 | 0.0160 |
| 509 | 9 | −0.0002 | 0.0003 | | | |
| 179 | 10 | −0.0002 | 0.0003 | | | |
| 85 | 8 | | | | | |
| 183 | 8 | | | | | |
| 674 | 8 | | | | | |
| 674 | 10 | 0.0002 | 0.0001 | | | |
| 674 | 11 | | | | | |
| 806 | 9 | 0.0370 | 0.0006 | 0.0360 | 0.0890 | 0.0014 |
| 806 | 11 | | | | | |
| 822 | 10 | 0.1400 | 0.1400 | 0.0100 | 0.0088 | 0.0086 |
| 1173 | 10 | −0.0002 | 0.0003 | | | |
| 422 | 11 | | | | | |
| 608 | 8 | | | | | |
| 181 | 8 | | | | | |
| 181 | 10 | 0.0002 | 0.0005 | | | |
| 841 | 9 | 0.0040 | 0.0014 | | | |
| 852 | 9 | 0.4800 | 0.0700 | 0.0990 | 0.0370 | 0.1100 |
| 972 | 10 | 0.0072 | 0.0330 | 0.3700 | 0.2300 | 0.2200 |
| 774 | 11 | | | | | |
| 889 | 8 | | | | | |
| 889 | 9 | 0.0034 | 0.0237 | 0.0940 | 0.2200 | 0.0630 |
| 889 | 10 | 0.0011 | 0.0003 | | | |
| 960 | 9 | 0.0017 | 0.0006 | | | |
| 960 | 11 | | | | | |
| 833 | 8 | | | | | |
| 360 | 9 | 0.0002 | 0.0036 | | | |
| 360 | 10 | 0.0003 | 0.0056 | | | |
| 427 | 8 | | | | | |
| 758 | 8 | | | | | |
| 745 | 9 | 0.0058 | 0.0007 | 0.0015 | 0.0820 | 0.1200 |
| 850 | 11 | | | | | |
| 1162 | 8 | | | | | |
| 1162 | 10 | −0.0002 | −0.0002 | | | |
| 927 | 11 | | | | | |
| 996 | 11 | | | | | |
| 999 | 8 | | | | | |
| 95 | 9 | 0.0002 | 0.0001 | | | |
| 1065 | 8 | | | | | |
| 1102 | 10 | 0.0003 | 0.0001 | | | |
| 749 | 8 | | | | | |
| 128 | 11 | | | | | |
| 491 | 9 | 0.0046 | 0.0010 | | | |
| 709 | 8 | | | | | |
| 178 | 11 | | | | | |
| 160 | 11 | | | | | |
| 141 | 10 | 0.2000 | 0.0130 | 0.0270 | 0.0047 | 0.0002 |
| 711 | 11 | | | | | |
| 24 | 9 | 0.0007 | 0.0520 | 0.0002 | 0.0006 | 0.0110 |
| 24 | 11 | | | | | |
| 93 | 8 | | | | | |
| 93 | 11 | | | | | |
| 90 | 9 | 0.0029 | 0.0005 | | | |
| 90 | 11 | | | | | |
| 190 | 11 | | | | | |
| 713 | 9 | 0.0007 | 0.0038 | | | |
| 713 | 10 | 0.0570 | 0.1100 | 0.0055 | 0.0013 | 0.0002 |
| 840 | 10 | 0.1800 | 0.0001 | 0.9500 | 0.0021 | 0.0036 |
| 978 | 8 | | | | | |
| 143 | 8 | | | | | |
| 217 | 10 | 0.0068 | 0.0130 | 0.4500 | 0.0220 | 0.0250 |
| 545 | 8 | | | | | |
| 358 | 11 | | | | | |
| 281 | 8 | | | | | |
| 208 | 10 | −0.0002 | 0.0020 | | | |
| 22 | 11 | | | | | |
| 423 | 10 | 0.0170 | 0.0750 | 0.0340 | 0.0390 | 0.2500 |
| 323 | 8 | | | | | |
| 323 | 11 | | | | | |
| 948 | 10 | 0.0130 | 0.1200 | 0.0018 | 0.0120 | 0.0250 |
| 166 | 10 | 0.0430 | 3.6000 | 0.0370 | 0.0420 | 0.0400 |
| 182 | 9 | 0.0004 | 0.0005 | | | |
| 1172 | 11 | | | | | |
| 218 | 9 | 0.0004 | 0.0230 | 0.1400 | 0.0890 | 0.0970 |
| 218 | 11 | | | | | |
| 479 | 9 | 0.0006 | 0.0072 | | | |
| 911 | 11 | | | | | |
| 597 | 9 | 0.0100 | −0.0002 | | | |
| 666 | 11 | | | | | |
| 84 | 9 | 0.0033 | 0.0007 | | | |
| 754 | 9 | 0.4000 | 0.0130 | 0.1400 | 0.1000 | 0.0001 |
| 851 | 10 | 0.0820 | 0.0072 | 0.0052 | 0.0032 | 0.0005 |
| 973 | 9 | −0.0002 | 0.0021 | | | |
| 322 | 9 | 0.0002 | 0.0140 | 0.0011 | 0.0037 | 0.1000 |
| 129 | 10 | 0.0002 | 0.0005 | | | |
| 669 | 8 | | | | | |
| 669 | 9 | 0.1100 | 0.7200 | 1.4000 | 0.3700 | 2.0000 |
| 669 | 10 | 0.0030 | 0.0160 | 0.0620 | 0.1500 | 0.5400 |
| 739 | 9 | 0.0002 | 0.0001 | | | |
| 452 | 8 | | | | | |
| 888 | 9 | −0.0002 | −0.0002 | | | |
| 888 | 10 | 0.0085 | 0.0016 | | | |
| 888 | 11 | | | | | |
| 959 | 8 | | | | | |
| 959 | 10 | −0.0002 | 0.0002 | | | |
| 835 | 10 | 0.0003 | 0.0001 | | | |
| 83 | 10 | 0.0043 | 0.0013 | | | |
| 1139 | 8 | | | | | |

[0489] TABLE X
HER2/NEU A24 Supermotif Peptides with Binding Data

| | No. of | |
|---|---|---|
| Position | Amino Acids | A*2401 |
| 1216 | 8 | 0.0039 |
| 1186 | 11 | |
| 730 | 9 | 0.0002 |
| 730 | 10 | 0.0010 |
| 730 | 11 | 0.0008 |
| 1212 | 9 | 0.0011 |
| 1212 | 10 | |
| 1212 | 11 | |
| 113 | 11 | |
| 5 | 8 | |
| 5 | 9 | |
| 5 | 11 | |
| 890 | 10 | |
| 466 | 9 | |
| 466 | 11 | |
| 270 | 10 | |
| 705 | 8 | |
| 705 | 10 | 0.0002 |
| 705 | 11 | −0.0003 |
| 1165 | 9 | |
| 1190 | 8 | |
| 115 | 9 | |
| 355 | 10 | |
| 657 | 11 | |
| 414 | 9 | 0.0041 |
| 440 | 9 | 0.1300 |
| 440 | 11 | 0.0230 |
| 771 | 11 | |
| 475 | 8 | 0.0190 |
| 475 | 11 | 0.0003 |
| 255 | 9 | |
| 789 | 8 | |
| 826 | 8 | |
| 826 | 10 | |
| 826 | 11 | −0.0003 |
| 244 | 10 | |
| 26 | 8 | |
| 26 | 10 | |
| 630 | 8 | |
| 947 | 8 | |
| 947 | 9 | |
| 540 | 8 | |
| 540 | 11 | |
| 504 | 11 | |
| 528 | 8 | |
| 295 | 9 | |
| 295 | 10 | |
| 342 | 9 | 0.0180 |
| 162 | 8 | 0.0120 |
| 162 | 11 | 0.0016 |
| 863 | 8 | 0.0005 |
| 863 | 10 | 0.0002 |
| 171 | 9 | |
| 171 | 11 | |
| 76 | 8 | |
| 76 | 10 | |
| 76 | 11 | |
| 845 | 8 | |
| 1089 | 10 | |
| 993 | 8 | |
| 933 | 9 | |
| 821 | 9 | |
| 421 | 8 | |
| 421 | 11 | |
| 607 | 8 | |
| 607 | 10 | |
| 1016 | 8 | |
| 1016 | 9 | |
| 1013 | 11 | |
| 165 | 8 | |
| 165 | 9 | |
| 1084 | 9 | |
| 307 | 11 | |
| 838 | 9 | |
| 904 | 10 | |
| 950 | 10 | |
| 950 | 11 | |
| 363 | 8 | −0.0003 |
| 363 | 9 | 0.0003 |
| 766 | 9 | |
| 147 | 8 | |
| 147 | 9 | |
| 405 | 8 | |
| 405 | 11 | |
| 2 | 8 | |
| 2 | 10 | |
| 2 | 11 | |
| 460 | 8 | |
| 460 | 9 | |
| 265 | 10 | |
| 914 | 10 | |
| 139 | 10 | |
| 139 | 11 | |
| 719 | 8 | |
| 61 | 11 | |
| 971 | 9 | |
| 1123 | 9 | |
| 717 | 10 | |
| 693 | 8 | |
| 40 | 10 | |
| 40 | 11 | |
| 401 | 9 | |
| 401 | 10 | |
| 401 | 11 | |
| 79 | 8 | |
| 352 | 10 | |
| 876 | 11 | −0.0003 |
| 1022 | 9 | 0.0014 |
| 1022 | 10 | 0.0120 |
| 553 | 9 | 0.0061 |
| 73 | 11 | |
| 899 | 8 | |
| 899 | 10 | |
| 476 | 10 | |
| 476 | 11 | |
| 986 | 9 | |
| 1004 | 11 | |
| 262 | 10 | |
| 787 | 10 | |
| 672 | 11 | |
| 660 | 8 | |
| 925 | 10 | |
| 925 | 11 | |
| 449 | 10 | |
| 464 | 11 | |
| 865 | 8 | |
| 447 | 9 | |
| 136 | 10 | |
| 454 | 8 | |
| 1091 | 8 | −0.0003 |
| 1091 | 11 | −0.0003 |
| 832 | 10 | |
| 28 | 8 | |
| 1239 | 10 | |
| 1239 | 11 | |
| 104 | 9 | |
| 104 | 11 | |
| 732 | 8 | |
| 732 | 9 | |
| 776 | 10 | |
| 776 | 11 | |
| 603 | 8 | |
| 603 | 9 | |
| 603 | 11 | |
| 152 | 10 | |
| 909 | 8 | |
| 909 | 10 | |
| 668 | 8 | |
| 1179 | 9 | |
| 408 | 8 | 0.0044 |
| 257 | 10 | 0.0002 |
| 473 | 10 | |
| 42 | 8 | |
| 42 | 9 | |
| 478 | 8 | |
| 478 | 9 | |
| 858 | 9 | |
| 809 | 9 | |
| 370 | 8 | 0.0120 |
| 172 | 8 | −0.0003 |
| 172 | 10 | 0.0022 |
| 654 | 8 | |
| 654 | 9 | |
| 654 | 10 | |
| 767 | 8 | |
| 435 | 9 | |
| 435 | 11 | |
| 673 | 10 | |
| 148 | 8 | |
| 661 | 11 | |
| 954 | 8 | 0.0210 |
| 861 | 9 | |
| 861 | 10 | |
| 406 | 10 | |
| 101 | 8 | |
| 738 | 11 | 0.0027 |
| 369 | 8 | |
| 369 | 9 | |
| 747 | 9 | |
| 681 | 10 | |
| 681 | 11 | |
| 860 | 10 | |
| 860 | 11 | |
| 722 | 10 | |
| 724 | 8 | |
| 883 | 9 | |
| 887 | 8 | 0.0080 |
| 887 | 9 | 0.0150 |
| 684 | 8 | 0.0024 |
| 107 | 8 | 0.0006 |
| 107 | 11 | 0.0006 |
| 485 | 9 | 0.0002 |
| 485 | 10 | 0.0014 |
| 467 | 8 | |
| 467 | 10 | |
| 674 | 9 | |
| 154 | 8 | |
| 154 | 10 | |
| 869 | 9 | |
| 1008 | 10 | |
| 934 | 8 | |
| 822 | 8 | |
| 690 | 11 | |
| 662 | 10 | |
| 800 | 8 | 0.0076 |
| 915 | 9 | 0.0001 |
| 1131 | 9 | |
| 145 | 10 | |
| 145 | 11 | |
| 443 | 8 | |
| 443 | 10 | |
| 443 | 11 | |
| 651 | 11 | |
| 790 | 11 | |
| 62 | 10 | |
| 1017 | 8 | |
| 696 | 11 | |
| 852 | 10 | |
| 1024 | 8 | |
| 972 | 8 | |
| 796 | 8 | |
| 796 | 11 | |
| 271 | 9 | |
| 663 | 9 | |
| 663 | 11 | |
| 410 | 10 | 0.0840 |
| 960 | 10 | |
| 953 | 8 | |
| 953 | 9 | |
| 916 | 8 | |
| 916 | 11 | |
| 360 | 11 | |
| 427 | 9 | |
| 427 | 10 | |
| 388 | 10 | |
| 275 | 8 | |
| 758 | 10 | |
| 758 | 11 | |
| 745 | 8 | |
| 745 | 11 | |
| 824 | 10 | 0.0002 |
| 945 | 8 | |
| 945 | 9 | |
| 945 | 10 | |
| 945 | 11 | |
| 885 | 10 | |
| 885 | 11 | |
| 627 | 11 | |
| 999 | 10 | |
| 999 | 11 | |
| 1119 | 9 | |
| 391 | 10 | |
| 1130 | 10 | |
| 699 | 8 | |
| 197 | 9 | 0.0011 |
| 1241 | 8 | |
| 1241 | 9 | |
| 1241 | 11 | |
| 1102 | 8 | |
| 1102 | 11 | |
| 66 | 8 | |
| 66 | 9 | |
| 525 | 10 | |
| 525 | 11 | |
| 128 | 10 | |
| 922 | 10 | 0.0005 |
| 780 | 9 | 0.1700 |
| 780 | 11 | 0.0320 |
| 828 | 8 | |
| 828 | 9 | |
| 513 | 9 | |
| 160 | 8 | |
| 160 | 9 | |
| 160 | 10 | |
| 106 | 9 | |
| 484 | 10 | |
| 484 | 11 | |
| 799 | 8 | |
| 799 | 9 | |
| 396 | 8 | |
| 396 | 11 | |
| 141 | 8 | |
| 141 | 9 | |
| 795 | 9 | |
| 711 | 10 | |
| 24 | 8 | |
| 24 | 10 | |
| 398 | 9 | |
| 429 | 8 | |
| 93 | 9 | |
| 90 | 10 | |
| 54 | 9 | |
| 54 | 11 | |
| 968 | 9 | 0.0180 |
| 898 | 9 | 0.0110 |
| 898 | 11 | |
| 985 | 10 | 0.0002 |
| 434 | 8 | |
| 434 | 10 | |
| 713 | 8 | |
| 100 | 8 | |
| 100 | 9 | |
| 816 | 8 | |
| 816 | 10 | |
| 868 | 10 | |
| 689 | 8 | |
| 34 | 10 | |
| 940 | 10 | |
| 98 | 10 | |
| 98 | 11 | |
| 978 | 9 | 0.0032 |
| 340 | 8 | |
| 340 | 11 | |
| 545 | 10 | |
| 8 | 8 | 0.0250 |
| 8 | 9 | 1.3000 |
| 1111 | 10 | 0.0120 |
| 653 | 9 | |
| 653 | 10 | |
| 653 | 11 | |
| 373 | 9 | |
| 1007 | 8 | |
| 1007 | 11 | |
| 418 | 8 | |
| 418 | 11 | |
| 1100 | 10 | |
| 457 | 9 | |
| 457 | 11 | |
| 70 | 8 | |
| 144 | 11 | |
| 442 | 9 | |
| 442 | 11 | |
| 281 | 9 | 0.0001 |
| 281 | 11 | 0.0180 |
| 305 | 9 | |
| 1002 | 8 | |
| 22 | 10 | |
| 1051 | 9 | |
| 1051 | 11 | |
| 792 | 9 | |
| 792 | 10 | |
| 423 | 9 | |
| 451 | 8 | −0.0003 |
| 451 | 11 | 0.0036 |
| 907 | 9 | 0.1200 |
| 907 | 10 | 0.0630 |
| 834 | 8 | 0.0059 |
| 609 | 8 | 0.3200 |
| 917 | 10 | 0.0002 |
| 948 | 8 | |
| 166 | 8 | |
| 402 | 8 | |
| 402 | 9 | |
| 402 | 10 | |
| 402 | 11 | |
| 1166 | 8 | |
| 444 | 9 | |
| 444 | 10 | |
| 686 | 11 | −0.0003 |
| 1117 | 11 | |
| 479 | 8 | |
| 793 | 8 | |
| 793 | 9 | |
| 793 | 11 | |
| 911 | 8 | |
| 733 | 8 | |
| 63 | 9 | 0.0380 |
| 63 | 11 | 8.9000 |
| 273 | 10 | 0.0074 |
| 1085 | 8 | |
| 399 | 8 | −0.0003 |
| 399 | 11 | |
| 424 | 8 | −0.0003 |
| 116 | 8 | |
| 725 | 11 | |
| 666 | 8 | |
| 666 | 9 | |
| 666 | 10 | |
| 153 | 9 | |
| 153 | 11 | |
| 546 | 9 | |
| 851 | 11 | |
| 773 | 9 | 0.0001 |
| 296 | 8 | |
| 296 | 9 | |
| 129 | 9 | |
| 797 | 10 | |
| 797 | 11 | |
| 356 | 9 | |
| 910 | 9 | |
| 272 | 8 | |
| 272 | 11 | |
| 658 | 10 | |
| 987 | 8 | |
| 1180 | 8 | |
| 665 | 9 | |
| 665 | 10 | |
| 665 | 11 | |
| 55 | 8 | |
| 55 | 10 | |
| 55 | 11 | |
| 664 | 8 | |
| 664 | 10 | |
| 664 | 11 | |
| 905 | 9 | 0.0800 |
| 905 | 11 | 0.0920 |
| 951 | 9 | 0.1600 |
| 951 | 10 | 0.0220 |
| 951 | 11 | 1.8000 |
| 739 | 10 | |
| 452 | 10 | |
| 888 | 8 | −0.0003 |
| 959 | 11 | 0.0011 |
| 411 | 9 | |
| 64 | 8 | |
| 64 | 10 | |
| 64 | 11 | |
| 303 | 11 | |
| 1023 | 8 | |
| 1023 | 9 | |
| 409 | 11 | |
| 952 | 8 | 0.0009 |
| 952 | 9 | |
| 952 | 10 | 0.0019 |
| 772 | 10 | 0.0001 |
| 554 | 8 | |
| 781 | 8 | |
| 781 | 10 | |

[0490] TABLE XI
HER2/NEU B07 Supermotif Peptides with Binding Data

| | No. of | |
|---|---|---|
| Position | Amino Acids | A*2401 |
| 1036 | 8 | 0.0063 |
| 390 | 8 | −0.0006 |
| 390 | 10 | 0.0001 |
| 390 | 11 | 0.0011 |
| 1129 | 11 | −0.0002 |
| 1204 | 9 | 0.0056 |
| 1204 | 10 | 0.0530 |
| 1076 | 10 | 0.0002 |
| 1076 | 11 | 0.0006 |
| 642 | 10 | 0.1500 |
| 1032 | 8 | −0.0002 |
| 1032 | 11 | −0.0002 |
| 626 | 10 | 0.0002 |
| 315 | 8 | −0.0006 |
| 315 | 10 | 0.0001 |
| 600 | 9 | 0.0140 |
| 600 | 11 | 0.0300 |
| 299 | 10 | 0.0016 |
| 1034 | 9 | 0.0001 |
| 1034 | 10 | 0.0002 |
| 384 | 9 | 0.0004 |
| 121 | 9 | 0.0002 |
| 982 | 8 | −0.0006 |
| 1105 | 8 | −0.0006 |
| 698 | 8 | −0.0002 |
| 698 | 9 | 0.0110 |
| 995 | 10 | 0.0510 |
| 995 | 11 | 0.0036 |
| 578 | 8 | −0.0006 |
| 578 | 9 | 0.0001 |
| 578 | 11 | −0.0003 |
| 522 | 8 | −0.0006 |
| 246 | 8 | 0.0092 |
| 246 | 9 | 0.0001 |
| 246 | 11 | 0.0006 |
| 1155 | 9 | 0.0900 |
| 1155 | 11 | 0.0160 |
| 524 | 11 | 0.0005 |
| 564 | 11 | −0.0002 |
| 1208 | 9 | 0.0093 |
| 1208 | 10 | 0.0018 |
| 926 | 9 | 0.0006 |
| 926 | 10 | 0.0004 |
| 740 | 9 | 0.0001 |
| 740 | 11 | 0.0023 |
| 931 | 11 | −0.0002 |
| 748 | 8 | 0.0120 |
| 336 | 8 | −0.0006 |
| 336 | 10 | 0.0370 |
| 605 | 9 | 0.0720 |
| 605 | 10 | 0.0001 |
| 921 | 8 | 0.0150 |
| 921 | 11 | 0.0430 |
| 1157 | 9 | 0.0027 |
| 1157 | 11 | 0.0140 |
| 35 | 9 | 0.0002 |
| 35 | 11 | −0.0002 |
| 419 | 10 | 0.0003 |
| 377 | 10 | 0.0001 |
| 16 | 10 | 0.0002 |
| 941 | 9 | 0.0280 |
| 941 | 11 | 0.0032 |
| 550 | 8 | 0.0012 |
| 1120 | 8 | −0.0006 |
| 1120 | 9 | 0.0002 |
| 1120 | 10 | 0.0001 |
| 231 | 11 | −0.0003 |
| 1101 | 9 | 0.0460 |
| 65 | 9 | 0.0260 |
| 65 | 10 | 0.0190 |
| 282 | 8 | −0.0006 |
| 282 | 10 | 0.0001 |
| 706 | 9 | 0.0090 |
| 706 | 10 | 0.0490 |
| 801 | 10 | 0.0085 |
| 284 | 8 | −0.0002 |
| 284 | 10 | 0.0001 |
| 1245 | 9 | 0.0001 |
| 1245 | 11 | −0.0002 |
| 1193 | 11 | −0.0003 |
| 488 | 10 | 0.0005 |
| 158 | 10 | 0.0001 |
| 158 | 11 | −0.0002 |
| 1210 | 8 | −0.0002 |
| 1210 | 11 | −0.0002 |
| 1227 | 11 | −0.0003 |
| 17 | 9 | 0.0001 |
| 944 | 8 | −0.0006 |
| 944 | 9 | 0.0001 |
| 944 | 10 | 0.0004 |
| 944 | 11 | 0.0064 |
| 1209 | 8 | −0.0002 |
| 1209 | 9 | 0.0002 |
| 1149 | 9 | 0.0054 |
| 1149 | 11 | 0.4500 |
| 1233 | 11 | −0.0003 |
| 393 | 8 | −0.0002 |
| 393 | 11 | −0.0002 |
| 1136 | 10 | 0.0001 |
| 1206 | 8 | 0.0002 |
| 1206 | 11 | 0.0003 |
| 943 | 9 | 0.0001 |
| 943 | 10 | 0.0001 |
| 943 | 11 | 0.0020 |
| 1148 | 10 | 0.0014 |
| 568 | 10 | 0.0004 |
| 499 | 11 | −0.0002 |
| 966 | 8 | 0.0410 |
| 966 | 11 | 1.3000 |
| 1214 | 8 | −0.0002 |
| 1214 | 9 | 0.0001 |
| 1214 | 10 | 0.0001 |
| 38 | 8 | 0.0014 |
| 38 | 9 | 0.0005 |
| 133 | 8 | 0.0550 |
| 133 | 10 | 0.0580 |
| 1174 | 8 | 0.0230 |
| 1174 | 11 | −0.0002 |
| 760 | 8 | 0.0580 |
| 760 | 9 | 0.1200 |
| 1073 | 9 | 0.0030 |
| 998 | 8 | −0.0006 |
| 998 | 11 | 0.0640 |
| 649 | 9 | 0.0150 |
| 649 | 10 | 0.0900 |
| 649 | 11 | 0.0250 |
| 196 | 10 | 0.0021 |
| 855 | 10 | 0.0016 |
| 1151 | 9 | 0.6400 |
| 1151 | 10 | 0.4600 |
| 779 | 8 | 0.0440 |
| 779 | 10 | 0.1000 |
| 701 | 10 | 0.0001 |
| 1240 | 9 | |
| 1240 | 10 | 0.0002 |
| 127 | 11 | −0.0002 |
| 884 | 8 | 1.4000 |
| 884 | 11 | 0.0017 |
| 1118 | 10 | 0.0001 |
| 1118 | 11 | −0.0002 |
| 94 | 8 | 0.0020 |
| 94 | 9 | 0.0077 |
| 415 | 8 | 0.0200 |
| 415 | 10 | 0.0044 |
| 415 | 11 | 0.0005 |

[0491] TABLE XII
HER2/NEU B27 Supermotif Peptides

| | No. of |
|---|---|
| Position | Amino Acids |
| 87 | 10 |
| 588 | 8 |
| 598 | 11 |
| 980 | 10 |
| 928 | 8 |
| 867 | 11 |
| 1160 | 8 |
| 339 | 9 |
| 511 | 11 |
| 367 | 8 |
| 367 | 10 |
| 367 | 11 |
| 965 | 8 |
| 544 | 11 |
| 7 | 9 |
| 7 | 10 |
| 808 | 10 |
| 936 | 11 |
| 1229 | 9 |
| 939 | 8 |
| 939 | 11 |
| 173 | 9 |
| 173 | 11 |
| 969 | 8 |
| 969 | 11 |
| 486 | 8 |
| 486 | 9 |
| 1176 | 10 |
| 882 | 8 |
| 882 | 10 |
| 433 | 9 |
| 433 | 11 |
| 815 | 8 |
| 815 | 9 |
| 815 | 11 |
| 469 | 8 |
| 174 | 8 |
| 174 | 10 |
| 174 | 11 |
| 843 | 10 |
| 468 | 9 |
| 675 | 8 |
| 675 | 11 |
| 886 | 9 |
| 886 | 10 |
| 431 | 11 |
| 682 | 9 |
| 682 | 10 |
| 248 | 9 |
| 248 | 11 |
| 368 | 9 |
| 368 | 10 |
| 676 | 10 |
| 266 | 9 |
| 256 | 8 |
| 256 | 11 |
| 436 | 8 |
| 436 | 10 |
| 458 | 8 |
| 458 | 10 |
| 458 | 11 |
| 137 | 9 |
| 99 | 9 |
| 99 | 10 |
| 33 | 11 |
| 455 | 11 |
| 142 | 8 |
| 712 | 9 |
| 687 | 10 |
| 259 | 8 |
| 857 | 8 |
| 857 | 10 |
| 764 | 9 |
| 764 | 11 |
| 813 | 10 |
| 813 | 11 |
| 1207 | 11 |
| 761 | 8 |
| 247 | 10 |
| 551 | 11 |
| 967 | 10 |
| 680 | 8 |
| 680 | 11 |
| 646 | 9 |
| 646 | 10 |
| 984 | 11 |
| 97 | 11 |
| 156 | 8 |
| 1110 | 11 |
| 721 | 11 |
| 683 | 8 |
| 683 | 9 |
| 897 | 10 |
| 688 | 9 |
| 677 | 9 |
| 677 | 11 |
| 896 | 11 |
| 335 | 9 |
| 335 | 11 |
| 189 | 10 |
| 783 | 8 |
| 977 | 10 |
| 1103 | 10 |
| 472 | 11 |
| 41 | 9 |
| 41 | 10 |
| 900 | 9 |
| 1052 | 8 |
| 1052 | 10 |
| 842 | 11 |
| 477 | 0 |
| 477 | 10 |
| 746 | 10 |
| 859 | 8 |
| 859 | 11 |
| 604 | 8 |
| 604 | 10 |
| 604 | 11 |
| 853 | 9 |
| 723 | 9 |
| 353 | 9 |
| 810 | 8 |
| 102 | 11 |
| 839 | 8 |
| 91 | 9 |
| 91 | 11 |
| 169 | 11 |
| 877 | 10 |
| 1005 | 10 |

[0492] TABLE XIII
HER2/NEU B58 Supermotif Peptides

| | No. of |
|---|---|
| Position | Amino Acids |
| 1094 | 8 |
| 4 | 8 |
| 4 | 9 |
| 4 | 10 |
| 1203 | 11 |
| 1159 | 9 |
| 293 | 9 |
| 293 | 11 |
| 69 | 9 |
| 37 | 9 |
| 37 | 10 |
| 132 | 9 |
| 132 | 11 |
| 997 | 8 |
| 997 | 9 |
| 648 | 8 |
| 648 | 11 |
| 21 | 11 |
| 1165 | 9 |
| 587 | 9 |
| 587 | 11 |
| 224 | 8 |
| 338 | 8 |
| 338 | 10 |
| 334 | 8 |
| 334 | 10 |
| 195 | 11 |
| 1133 | 8 |
| 531 | 11 |
| 244 | 10 |
| 26 | 8 |
| 26 | 10 |
| 630 | 8 |
| 947 | 8 |
| 947 | 9 |
| 947 | 10 |
| 962 | 8 |
| 962 | 11 |
| 417 | 8 |
| 417 | 9 |
| 1001 | 8 |
| 1001 | 9 |
| 165 | 8 |
| 165 | 9 |
| 580 | 11 |
| 770 | 8 |
| 892 | 8 |
| 280 | 10 |
| 207 | 9 |
| 1123 | 9 |
| 717 | 9 |
| 717 | 10 |
| 693 | 8 |
| 874 | 11 |
| 40 | 10 |
| 40 | 11 |
| 401 | 9 |
| 401 | 10 |
| 401 | 11 |
| 364 | 8 |
| 364 | 11 |
| 1213 | 8 |
| 1213 | 9 |
| 1213 | 10 |
| 1213 | 11 |
| 976 | 11 |
| 899 | 8 |
| 899 | 10 |
| 1093 | 9 |
| 621 | 8 |
| 729 | 10 |
| 729 | 11 |
| 1080 | 11 |
| 919 | 8 |
| 704 | 9 |
| 704 | 11 |
| 292 | 10 |
| 131 | 10 |
| 1164 | 10 |
| 1189 | 8 |
| 1189 | 9 |
| 439 | 10 |
| 309 | 9 |
| 1082 | 9 |
| 1082 | 11 |
| 727 | 8 |
| 727 | 9 |
| 372 | 10 |
| 778 | 8 |
| 778 | 9 |
| 778 | 11 |
| 818 | 8 |
| 818 | 10 |
| 28 | 8 |
| 1239 | 10 |
| 1239 | 11 |
| 104 | 9 |
| 104 | 11 |
| 732 | 8 |
| 732 | 9 |
| 878 | 9 |
| 878 | 11 |
| 249 | 8 |
| 249 | 10 |
| 495 | 11 |
| 478 | 8 |
| 478 | 9 |
| 86 | 9 |
| 86 | 11 |
| 829 | 8 |
| 829 | 11 |
| 655 | 8 |
| 655 | 9 |
| 655 | 10 |
| 655 | 11 |
| 412 | 8 |
| 412 | 11 |
| 450 | 9 |
| 861 | 9 |
| 861 | 10 |
| 406 | 10 |
| 762 | 11 |
| 854 | 8 |
| 854 | 11 |
| 1171 | 10 |
| 1171 | 11 |
| 3 | 9 |
| 3 | 10 |
| 3 | 11 |
| 846 | 8 |
| 253 | 11 |
| 374 | 8 |
| 465 | 10 |
| 1075 | 11 |
| 114 | 10 |
| 71 | 10 |
| 1173 | 8 |
| 1173 | 9 |
| 304 | 10 |
| 304 | 11 |
| 422 | 9 |
| 422 | 10 |
| 608 | 9 |
| 1131 | 9 |
| 1131 | 10 |
| 145 | 9 |
| 145 | 10 |
| 145 | 11 |
| 443 | 8 |
| 443 | 10 |
| 443 | 11 |
| 651 | 8 |
| 651 | 9 |
| 651 | 11 |
| 790 | 8 |
| 790 | 11 |
| 62 | 10 |
| 774 | 8 |
| 774 | 9 |
| 889 | 11 |
| 979 | 8 |
| 979 | 9 |
| 979 | 10 |
| 979 | 11 |
| 833 | 9 |
| 833 | 10 |
| 916 | 8 |
| 916 | 11 |
| 68 | 10 |
| 388 | 10 |
| 275 | 8 |
| 471 | 10 |
| 758 | 10 |
| 758 | 11 |
| 1158 | 10 |
| 643 | 9 |
| 1215 | 8 |
| 1215 | 9 |
| 1211 | 10 |
| 1211 | 11 |
| 269 | 11 |
| 1035 | 8 |
| 1035 | 9 |
| 927 | 8 |
| 927 | 9 |
| 385 | 8 |
| 36 | 8 |
| 36 | 10 |
| 36 | 11 |
| 996 | 9 |
| 996 | 10 |
| 1065 | 11 |
| 1077 | 9 |
| 1077 | 10 |
| 1121 | 8 |
| 1121 | 11 |
| 702 | 11 |
| 601 | 8 |
| 601 | 10 |
| 601 | 11 |
| 1150 | 8 |
| 1241 | 8 |
| 1241 | 9 |
| 1241 | 11 |
| 1102 | 8 |
| 1102 | 11 |
| 66 | 8 |
| 66 | 9 |
| 525 | 10 |
| 525 | 11 |
| 902 | 9 |
| 902 | 11 |
| 1099 | 11 |
| 190 | 9 |
| 647 | 8 |
| 647 | 9 |
| 354 | 8 |
| 354 | 11 |
| 1053 | 9 |
| 1053 | 11 |
| 1006 | 9 |
| 456 | 10 |
| 143 | 11 |
| 188 | 11 |
| 656 | 8 |
| 656 | 9 |
| 656 | 10 |
| 656 | 11 |
| 413 | 10 |
| 208 | 8 |
| 1049 | 11 |
| 1050 | 10 |
| 305 | 9 |
| 305 | 10 |
| 1002 | 8 |
| 22 | 10 |
| 1051 | 9 |
| 1051 | 11 |
| 792 | 9 |
| 792 | 10 |
| 297 | 8 |
| 1242 | 8 |
| 1242 | 10 |
| 496 | 10 |
| 389 | 9 |
| 389 | 11 |
| 357 | 8 |
| 652 | 8 |
| 652 | 10 |
| 652 | 11 |
| 759 | 9 |
| 759 | 10 |
| 791 | 10 |
| 791 | 11 |
| 585 | 11 |
| 597 | 8 |
| 782 | 9 |
| 296 | 8 |
| 296 | 9 |
| 129 | 9 |
| 797 | 10 |
| 797 | 11 |
| 356 | 9 |
| 910 | 9 |
| 272 | 8 |
| 272 | 11 |
| 906 | 8 |
| 906 | 10 |
| 906 | 11 |
| 1112 | 9 |
| 441 | 8 |
| 441 | 10 |
| 289 | 8 |

[0493] TABLE XIV
HER2/NEU B62 Supermotif Peptides

| | No. of |
|---|---|
| Position | Amino Acids |
| 890 | 10 |
| 466 | 11 |
| 270 | 10 |
| 705 | 8 |
| 705 | 10 |
| 1036 | 8 |
| 390 | 10 |
| 390 | 11 |
| 1129 | 11 |
| 1204 | 10 |
| 1076 | 10 |
| 1076 | 11 |
| 355 | 10 |
| 657 | 8 |
| 657 | 9 |
| 657 | 10 |
| 255 | 9 |
| 789 | 9 |
| 826 | 8 |
| 826 | 10 |
| 1032 | 11 |
| 626 | 10 |
| 315 | 8 |
| 600 | 11 |
| 299 | 10 |
| 567 | 8 |
| 567 | 11 |
| 212 | 8 |
| 596 | 9 |
| 295 | 9 |
| 76 | 8 |
| 76 | 9 |
| 76 | 11 |
| 845 | 9 |
| 821 | 9 |
| 421 | 10 |
| 421 | 11 |
| 607 | 8 |
| 607 | 10 |
| 1016 | 8 |
| 1016 | 10 |
| 1013 | 11 |
| 1034 | 9 |
| 1034 | 10 |
| 121 | 9 |
| 982 | 8 |
| 1105 | 8 |
| 582 | 9 |
| 1183 | 9 |
| 1084 | 9 |
| 307 | 8 |
| 904 | 9 |
| 904 | 10 |
| 950 | 10 |
| 950 | 11 |
| 766 | 8 |
| 766 | 9 |
| 147 | 9 |
| 405 | 8 |
| 405 | 11 |
| 2 | 8 |
| 460 | 9 |
| 265 | 8 |
| 265 | 10 |
| 914 | 10 |
| 139 | 10 |
| 971 | 9 |
| 698 | 9 |
| 645 | 10 |
| 645 | 11 |
| 79 | 8 |
| 352 | 10 |
| 73 | 8 |
| 73 | 11 |
| 534 | 8 |
| 425 | 11 |
| 476 | 11 |
| 262 | 11 |
| 787 | 8 |
| 787 | 11 |
| 672 | 11 |
| 660 | 10 |
| 660 | 11 |
| 737 | 10 |
| 865 | 8 |
| 344 | 10 |
| 346 | 8 |
| 346 | 11 |
| 832 | 8 |
| 832 | 11 |
| 995 | 10 |
| 995 | 11 |
| 578 | 8 |
| 522 | 8 |
| 524 | 11 |
| 537 | 10 |
| 603 | 8 |
| 603 | 9 |
| 603 | 11 |
| 909 | 8 |
| 909 | 10 |
| 668 | 8 |
| 1179 | 9 |
| 473 | 8 |
| 473 | 10 |
| 42 | 9 |
| 349 | 8 |
| 48 | 8 |
| 48 | 9 |
| 564 | 11 |
| 1208 | 10 |
| 512 | 10 |
| 901 | 8 |
| 901 | 10 |
| 654 | 8 |
| 654 | 11 |
| 767 | 8 |
| 767 | 11 |
| 673 | 10 |
| 714 | 10 |
| 148 | 8 |
| 661 | 9 |
| 661 | 10 |
| 661 | 11 |
| 954 | 8 |
| 740 | 9 |
| 740 | 11 |
| 361 | 10 |
| 361 | 11 |
| 77 | 8 |
| 77 | 10 |
| 155 | 9 |
| 101 | 8 |
| 369 | 8 |
| 747 | 8 |
| 336 | 8 |
| 605 | 9 |
| 605 | 10 |
| 921 | 11 |
| 722 | 10 |
| 724 | 8 |
| 724 | 11 |
| 85 | 10 |
| 467 | 10 |
| 467 | 11 |
| 674 | 9 |
| 154 | 10 |
| 869 | 9 |
| 1008 | 11 |
| 785 | 10 |
| 822 | 8 |
| 15 | 11 |
| 690 | 8 |
| 662 | 8 |
| 662 | 9 |
| 662 | 10 |
| 800 | 11 |
| 915 | 9 |
| 35 | 11 |
| 16 | 10 |
| 941 | 9 |
| 941 | 11 |
| 1120 | 8 |
| 1120 | 9 |
| 65 | 9 |
| 74 | 10 |
| 74 | 11 |
| 445 | 8 |
| 547 | 8 |
| 547 | 9 |
| 140 | 9 |
| 392 | 8 |
| 392 | 9 |
| 1109 | 10 |
| 397 | 10 |
| 428 | 8 |
| 313 | 10 |
| 1017 | 9 |
| 696 | 11 |
| 841 | 11 |
| 852 | 8 |
| 852 | 10 |
| 1024 | 8 |
| 972 | 8 |
| 796 | 8 |
| 271 | 9 |
| 663 | 8 |
| 663 | 9 |
| 663 | 11 |
| 960 | 10 |
| 953 | 8 |
| 953 | 9 |
| 45 | 11 |
| 282 | 8 |
| 282 | 10 |
| 706 | 9 |
| 801 | 10 |
| 827 | 9 |
| 360 | 11 |
| 427 | 9 |
| 284 | 8 |
| 1245 | 9 |
| 1245 | 11 |
| 158 | 10 |
| 177 | 8 |
| 745 | 8 |
| 745 | 10 |
| 850 | 10 |
| 945 | 8 |
| 945 | 9 |
| 945 | 10 |
| 945 | 11 |
| 885 | 10 |
| 627 | 9 |
| 122 | 8 |
| 1119 | 9 |
| 1119 | 10 |
| 391 | 9 |
| 391 | 10 |
| 95 | 8 |
| 1108 | 11 |
| 1130 | 10 |
| 1130 | 11 |
| 699 | 8 |
| 650 | 9 |
| 650 | 10 |
| 197 | 9 |
| 1210 | 8 |
| 1227 | 11 |
| 17 | 9 |
| 944 | 8 |
| 944 | 9 |
| 944 | 10 |
| 944 | 11 |
| 1209 | 9 |
| 159 | 9 |
| 159 | 11 |
| 569 | 9 |
| 1135 | 11 |
| 1205 | 9 |
| 942 | 8 |
| 942 | 10 |
| 942 | 11 |
| 828 | 8 |
| 513 | 9 |
| 160 | 8 |
| 160 | 10 |
| 106 | 11 |
| 396 | 11 |
| 141 | 8 |
| 795 | 9 |
| 393 | 8 |
| 1136 | 10 |
| 1206 | 8 |
| 943 | 9 |
| 943 | 10 |
| 943 | 11 |
| 568 | 10 |
| 679 | 9 |
| 24 | 8 |
| 398 | 9 |
| 93 | 9 |
| 93 | 10 |
| 54 | 11 |
| 434 | 8 |
| 713 | 11 |
| 100 | 9 |
| 816 | 10 |
| 868 | 10 |
| 784 | 11 |
| 689 | 9 |
| 940 | 10 |
| 98 | 11 |
| 978 | 9 |
| 978 | 10 |
| 978 | 11 |
| 966 | 8 |
| 966 | 11 |
| 678 | 8 |
| 678 | 10 |
| 92 | 10 |
| 92 | 11 |
| 340 | 8 |
| 545 | 10 |
| 545 | 11 |
| 653 | 9 |
| 373 | 9 |
| 1007 | 8 |
| 418 | 8 |
| 70 | 8 |
| 70 | 11 |
| 144 | 10 |
| 442 | 9 |
| 442 | 11 |
| 281 | 9 |
| 281 | 11 |
| 1214 | 8 |
| 1214 | 9 |
| 1214 | 10 |
| 38 | 8 |
| 1174 | 8 |
| 1174 | 11 |
| 760 | 8 |
| 998 | 8 |
| 649 | 10 |
| 649 | 11 |
| 196 | 10 |
| 855 | 10 |
| 779 | 10 |
| 819 | 9 |
| 819 | 11 |
| 532 | 10 |
| 423 | 8 |
| 423 | 9 |
| 948 | 8 |
| 948 | 9 |
| 166 | 8 |
| 402 | 8 |
| 402 | 10 |
| 402 | 11 |
| 444 | 9 |
| 1172 | 9 |
| 1172 | 10 |
| 312 | 11 |
| 1240 | 9 |
| 526 | 9 |
| 105 | 8 |
| 23 | 9 |
| 1117 | 11 |
| 479 | 8 |
| 793 | 9 |
| 793 | 11 |
| 911 | 8 |
| 733 | 8 |
| 725 | 10 |
| 725 | 11 |
| 666 | 8 |
| 666 | 10 |
| 84 | 8 |
| 84 | 11 |
| 153 | 11 |
| 546 | 9 |
| 546 | 10 |
| 851 | 9 |
| 851 | 11 |
| 773 | 9 |
| 773 | 10 |
| 884 | 11 |
| 1118 | 10 |
| 1118 | 11 |

[0494] TABLE XV
HER2/NEU B62 Supermotif Peptides

| | No. of |
|---|---|
| Position | Amino Acids |
| 94 | 8 |
| 94 | 9 |
| 56 | 9 |
| 794 | 8 |
| 794 | 10 |
| 658 | 8 |
| 658 | 9 |
| 1180 | 8 |
| 665 | 9 |
| 665 | 11 |
| 55 | 10 |
| 664 | 8 |
| 664 | 10 |
| 739 | 8 |
| 739 | 10 |
| 959 | 11 |
| 415 | 10 |
| 415 | 11 |
| 835 | 8 |
| 1248 | 8 |
| 64 | 10 |
| 1023 | 8 |
| 1023 | 9 |
| 952 | 8 |
| 952 | 9 |
| 952 | 10 |
| 163 | 10 |
| 163 | 11 |
| 83 | 9 |
| 772 | 10 |
| 772 | 11 |
| 781 | 8 |

HER2/NEU A01 Motif Peptides with Binding Data

| | No. of | |
|---|---|---|
| Position | Amino Acids | A*0101 |
| 1212 | 10 | 0.0010 |
| 1212 | 11 | 0.0140 |
| 293 | 9 | 0.0550 |
| 293 | 11 | 0.1900 |
| 997 | 9 | 0.0290 |
| 826 | 10 | 0.3000 |
| 600 | 11 | |
| 334 | 10 | 0.0016 |
| 1013 | 11 | 0.0027 |
| 1105 | 8 | |
| 580 | 11 | 0.1000 |
| 280 | 10 | 0.1800 |
| 40 | 11 | 0.2800 |
| 401 | 9 | 0.0430 |
| 401 | 11 | 0.4400 |
| 279 | 11 | 0.0049 |
| 291 | 11 | 0.0100 |
| 1213 | 9 | 0.0430 |
| 1213 | 10 | 5.5000 |
| 899 | 10 | 2.7000 |
| 292 | 10 | 0.0012 |
| 1188 | 9 | |
| 995 | 11 | |
| 727 | 9 | 0.0011 |
| 1239 | 10 | 0.0630 |
| 104 | 9 | 0.1800 |
| 42 | 9 | 9.1000 |
| 901 | 8 | −0.0021 |
| 333 | 11 | −0.0017 |
| 403 | 9 | 0.0057 |
| 726 | 10 | 0.0010 |
| 869 | 9 | 7.6000 |
| 915 | 9 | 0.0011 |
| 1120 | 8 | |
| 74 | 10 | 0.0015 |
| 1131 | 9 | 0.1300 |
| 1014 | 10 | 0.0120 |
| 916 | 8 | −0.0021 |
| 764 | 9 | 0.0017 |
| 996 | 10 | 0.0150 |
| 601 | 10 | 0.0010 |
| 1241 | 8 | 0.0030 |
| 1102 | 11 | 0.0160 |
| 828 | 8 | −0.0021 |
| 728 | 8 | −0.0021 |
| 281 | 9 | 0.0028 |
| 1214 | 8 | |
| 1214 | 9 | |
| 1132 | 8 | −0.0021 |
| 1103 | 10 | 0.0015 |
| 402 | 8 | −0.0021 |
| 402 | 10 | 1.1000 |
| 399 | 11 | 0.0045 |
| 773 | 9 | 0.0400 |
| 296 | 8 | 0.1000 |

[0495] TABLE XVI
HER2/NEU A03 Motif Peptides with Binding Data

| | No. of | |
|---|---|---|
| Position | Amino Acids | A*0301 |
| 241 | 8 | |
| 241 | 9 | |
| 1094 | 11 | |
| 4 | 11 | |
| 1203 | 10 | |
| 1203 | 11 | |
| 847 | 8 | |
| 1159 | 11 | |
| 586 | 10 | |
| 191 | 10 | |
| 510 | 8 | |
| 510 | 10 | |
| 622 | 11 | |
| 879 | 9 | |
| 581 | 8 | |
| 581 | 9 | |
| 581 | 10 | |
| 581 | 11 | |
| 1186 | 11 | |
| 1212 | 10 | 0.0003 |
| 1212 | 11 | |
| 1163 | 9 | |
| 365 | 11 | |
| 242 | 8 | |
| 221 | 8 | |
| 1039 | 8 | |
| 1039 | 9 | |
| 1039 | 10 | |
| 775 | 10 | |
| 5 | 10 | |
| 890 | 8 | |
| 890 | 9 | 0.0013 |
| 890 | 10 | |
| 466 | 8 | |
| 466 | 11 | |
| 492 | 8 | |
| 14 | 8 | |
| 180 | 9 | 0.0004 |
| 180 | 11 | |
| 270 | 10 | |
| 705 | 9 | 0.0004 |
| 293 | 9 | 0.0008 |
| 293 | 11 | |
| 37 | 11 | |
| 997 | 8 | |
| 997 | 9 | 0.0002 |
| 997 | 10 | 0.0003 |
| 648 | 10 | |
| 355 | 10 | |
| 355 | 11 | |
| 240 | 9 | 0.0021 |
| 240 | 10 | |
| 220 | 9 | −0.0002 |
| 587 | 9 | |
| 235 | 8 | |
| 576 | 11 | |
| 252 | 9 | |
| 805 | 10 | 0.0003 |
| 826 | 10 | 0.0003 |
| 334 | 10 | 0.0003 |
| 195 | 9 | −0.0008 |
| 244 | 11 | |
| 26 | 9 | 0.0002 |
| 630 | 11 | |
| 947 | 11 | |
| 311 | 8 | |
| 584 | 8 | |
| 596 | 10 | 0.0220 |
| 634 | 11 | |
| 504 | 9 | |
| 528 | 9 | 0.0015 |
| 295 | 9 | 0.0002 |
| 234 | 8 | |
| 234 | 9 | |
| 251 | 8 | |
| 251 | 10 | |
| 211 | 11 | |
| 1011 | 10 | |
| 638 | 10 | |
| 638 | 11 | |
| 1012 | 9 | |
| 1087 | 8 | |
| 1087 | 9 | |
| 1087 | 10 | |
| 382 | 9 | |
| 742 | 10 | |
| 880 | 8 | |
| 880 | 11 | |
| 326 | 8 | |
| 326 | 11 | |
| 871 | 8 | |
| 871 | 9 | |
| 171 | 10 | |
| 76 | 8 | |
| 845 | 10 | 0.0018 |
| 636 | 9 | |
| 1089 | 8 | |
| 933 | 8 | |
| 821 | 10 | |
| 821 | 11 | |
| 607 | 9 | 0.0005 |
| 607 | 10 | |
| 1016 | 8 | |
| 1013 | 8 | |
| 1013 | 11 | |
| 30 | 8 | |
| 962 | 8 | |
| 962 | 9 | −0.0002 |
| 417 | 9 | |
| 165 | 9 | |
| 165 | 10 | |
| 165 | 11 | |
| 185 | 9 | |
| 1183 | 8 | |
| 1084 | 11 | |
| 838 | 10 | |
| 838 | 11 | |
| 1144 | 10 | 0.0003 |
| 950 | 8 | |
| 580 | 9 | |
| 580 | 10 | |
| 580 | 11 | |
| 1069 | 8 | |
| 543 | 10 | |
| 503 | 8 | |
| 503 | 10 | |
| 210 | 8 | |
| 1010 | 11 | |
| 501 | 10 | |
| 325 | 9 | |
| 837 | 8 | |
| 837 | 11 | |
| 363 | 9 | |
| 975 | 11 | |
| 1079 | 8 | |
| 507 | 10 | |
| 507 | 11 | |
| 1154 | 8 | |
| 1154 | 10 | |
| 286 | 8 | |
| 766 | 10 | |
| 147 | 11 | |
| 930 | 8 | |
| 930 | 11 | |
| 405 | 10 | |
| 460 | 10 | |
| 460 | 11 | |
| 265 | 10 | 0.0002 |
| 914 | 8 | |
| 914 | 10 | 0.0002 |
| 61 | 9 | |
| 695 | 11 | |
| 971 | 8 | |
| 971 | 10 | |
| 971 | 11 | |
| 379 | 8 | |
| 892 | 8 | |
| 892 | 10 | |
| 280 | 9 | 0.0003 |
| 280 | 10 | 0.0003 |
| 207 | 11 | |
| 717 | 8 | |
| 874 | 10 | 0.0003 |
| 40 | 8 | |
| 40 | 9 | |
| 40 | 11 | |
| 401 | 9 | 0.0002 |
| 401 | 11 | |
| 79 | 9 | |
| 79 | 10 | |
| 352 | 8 | |
| 321 | 10 | 0.0002 |
| 364 | 8 | |
| 1031 | 9 | |
| 595 | 11 | |
| 1086 | 9 | |
| 1086 | 10 | |
| 1086 | 11 | |
| 381 | 10 | |
| 1030 | 10 | |
| 918 | 11 | |
| 291 | 8 | |
| 291 | 11 | |
| 1187 | 10 | |
| 671 | 8 | |
| 671 | 11 | |
| 577 | 10 | |
| 371 | 11 | |
| 376 | 11 | |
| 73 | 11 | |
| 1213 | 9 | 0.0002 |
| 1213 | 10 | 0.0005 |
| 976 | 10 | −0.0002 |
| 976 | 11 | |
| 899 | 10 | 0.0003 |
| 476 | 11 | |
| 1202 | 11 | |
| 729 | 8 | |
| 1038 | 8 | |
| 1038 | 9 | 0.0002 |
| 1038 | 10 | |
| 1038 | 11 | |
| 919 | 10 | |
| 919 | 11 | |
| 704 | 10 | −0.0002 |
| 1231 | 8 | |
| 292 | 10 | 0.0003 |
| 131 | 8 | |
| 1164 | 8 | |
| 1189 | 8 | |
| 366 | 10 | |
| 366 | 11 | |
| 804 | 8 | |
| 804 | 11 | |
| 641 | 8 | |
| 1088 | 8 | |
| 1088 | 9 | |
| 1015 | 9 | |
| 383 | 8 | |
| 1029 | 8 | |
| 1029 | 11 | |
| 1201 | 8 | |
| 1188 | 9 | 0.0003 |
| 881 | 10 | |
| 135 | 9 | |
| 1040 | 8 | |
| 1040 | 9 | |
| 262 | 9 | |
| 672 | 10 | 0.0150 |
| 449 | 8 | |
| 449 | 11 | |
| 737 | 11 | |
| 508 | 9 | |
| 508 | 10 | 0.0110 |
| 464 | 10 | |
| 1062 | 9 | |
| 1062 | 11 | |
| 447 | 10 | 0.0037 |
| 344 | 8 | |
| 344 | 11 | |
| 10 | 11 | |
| 549 | 9 | |
| 549 | 10 | 0.0002 |
| 549 | 11 | |
| 1097 | 8 | |
| 136 | 8 | |
| 346 | 9 | −0.0002 |
| 346 | 10 | |
| 832 | 9 | −0.0002 |
| 1041 | 8 | |
| 309 | 10 | |
| 727 | 9 | 0.0028 |
| 727 | 10 | 0.0660 |
| 462 | 8 | |
| 462 | 9 | |
| 372 | 10 | |
| 572 | 10 | |
| 28 | 10 | |
| 1239 | 10 | 0.0002 |
| 104 | 9 | 0.0001 |
| 104 | 10 | |
| 327 | 10 | 0.0210 |
| 776 | 9 | 0.0010 |
| 603 | 8 | |
| 909 | 10 | |
| 668 | 9 | 0.0047 |
| 668 | 10 | 0.0180 |
| 668 | 11 | |
| 1179 | 8 | |
| 1179 | 9 | |
| 878 | 10 | 0.0003 |
| 267 | 8 | |
| 1104 | 8 | |
| 1104 | 9 | |
| 257 | 11 | |
| 42 | 9 | 0.0370 |
| 349 | 11 | |
| 632 | 9 | −0.0002 |
| 249 | 9 | |
| 249 | 10 | |
| 260 | 8 | |
| 260 | 11 | |
| 478 | 9 | |
| 478 | 10 | 0.0035 |
| 858 | 10 | |
| 858 | 11 | |
| 809 | 8 | |
| 263 | 8 | |
| 872 | 8 | |
| 961 | 8 | |
| 961 | 9 | |
| 961 | 10 | |
| 184 | 8 | |
| 184 | 10 | |
| 949 | 9 | |
| 172 | 9 | |
| 767 | 9 | |
| 673 | 9 | 0.3800 |
| 673 | 11 | |
| 714 | 8 | |
| 714 | 9 | 0.0190 |
| 714 | 11 | |
| 148 | 10 | 0.0400 |
| 661 | 11 | |
| 894 | 8 | |
| 167 | 8 | |
| 167 | 9 | 0.2800 |
| 450 | 10 | 0.0410 |
| 861 | 8 | |
| 406 | 9 | |
| 101 | 8 | |
| 762 | 10 | |
| 762 | 11 | |
| 333 | 8 | |
| 333 | 11 | |
| 957 | 10 | |
| 170 | 11 | |
| 591 | 8 | |
| 591 | 9 | |
| 1182 | 9 | |
| 615 | 8 | |
| 640 | 8 | |
| 640 | 9 | |
| 150 | 8 | |
| 1096 | 9 | |
| 831 | 10 | |
| 228 | 10 | |
| 1238 | 11 | |
| 369 | 8 | |
| 747 | 10 | 0.0009 |
| 681 | 8 | 0.0010 |
| 681 | 9 | 0.7600 |
| 860 | 8 | |
| 860 | 9 | 0.1700 |
| 32 | 11 | |
| 854 | 11 | |
| 722 | 9 | |
| 722 | 10 | |
| 724 | 8 | |
| 753 | 10 | 0.3800 |
| 753 | 11 | |
| 883 | 8 | |
| 846 | 9 | 0.0580 |
| 509 | 8 | |
| 509 | 9 | −0.0002 |
| 509 | 11 | |
| 253 | 8 | |
| 374 | 8 | |
| 465 | 9 | |
| 13 | 8 | |
| 13 | 9 | |
| 179 | 10 | −0.0002 |
| 6 | 9 | |
| 161 | 10 | 0.0081 |
| 637 | 8 | |
| 637 | 11 | |
| 768 | 8 | |
| 807 | 8 | |
| 807 | 10 | |
| 870 | 8 | |
| 870 | 9 | |
| 870 | 10 | |
| 43 | 8 | |
| 107 | 9 | |
| 485 | 8 | |
| 485 | 11 | |
| 448 | 9 | |
| 1061 | 10 | |
| 345 | 10 | |
| 345 | 11 | |
| 994 | 11 | |
| 726 | 10 | 0.0003 |
| 726 | 11 | |
| 461 | 9 | |
| 461 | 10 | |
| 667 | 10 | |
| 667 | 11 | |
| 85 | 8 | |
| 183 | 8 | |
| 183 | 9 | |
| 183 | 11 | |
| 467 | 10 | |
| 674 | 8 | |
| 674 | 10 | 0.0002 |
| 674 | 11 | |
| 154 | 10 | 0.0012 |
| 12 | 9 | |
| 12 | 10 | |
| 806 | 9 | 0.0370 |
| 806 | 11 | |
| 869 | 9 | 0.0003 |
| 869 | 10 | |
| 869 | 11 | |
| 11 | 10 | |
| 11 | 11 | |
| 822 | 9 | |
| 822 | 10 | 0.1400 |
| 662 | 10 | |
| 800 | 10 | |
| 915 | 9 | 0.0002 |
| 1173 | 10 | −0.0002 |
| 422 | 11 | |
| 608 | 8 | |
| 608 | 9 | |
| 1131 | 9 | 0.0001 |
| 181 | 8 | |
| 181 | 10 | 0.0002 |
| 181 | 11 | |
| 1197 | 8 | |
| 700 | 11 | |
| 215 | 11 | |
| 62 | 8 | |
| 696 | 10 | |
| 841 | 8 | |
| 841 | 9 | 0.0040 |
| 852 | 9 | 0.4800 |
| 1024 | 8 | |
| 972 | 9 | |
| 972 | 10 | 0.0072 |
| 796 | 8 | |
| 271 | 9 | |
| 663 | 9 | |
| 774 | 8 | |
| 774 | 11 | |
| 889 | 8 | |
| 889 | 9 | 0.0034 |
| 889 | 10 | 0.0011 |
| 889 | 11 | |
| 979 | 8 | |
| 1014 | 10 | 0.0002 |
| 960 | 9 | 0.0017 |
| 960 | 10 | |
| 960 | 11 | |
| 833 | 8 | |
| 833 | 11 | |
| 916 | 8 | |
| 556 | 9 | |
| 571 | 11 | |
| 1178 | 8 | |
| 1178 | 9 | |
| 1178 | 10 | |
| 360 | 9 | 0.0002 |
| 360 | 10 | 0.0003 |
| 59 | 11 | |
| 427 | 8 | |
| 427 | 11 | |
| 471 | 8 | |
| 758 | 8 | |
| 125 | 8 | |
| 745 | 9 | 0.0058 |
| 850 | 9 | |
| 850 | 11 | |
| 1158 | 8 | |
| 1215 | 8 | |
| 1211 | 11 | |
| 1162 | 8 | |
| 1162 | 10 | −0.0002 |
| 269 | 11 | |
| 1035 | 10 | |
| 1035 | 11 | |
| 927 | 11 | |
| 996 | 9 | |
| 996 | 10 | 0.0003 |
| 996 | 11 | |
| 625 | 8 | |
| 194 | 10 | |
| 741 | 11 | |
| 932 | 9 | |
| 606 | 10 | |
| 606 | 11 | |
| 416 | 10 | |
| 1143 | 11 | |
| 1037 | 8 | |
| 1037 | 9 | |
| 1037 | 10 | |
| 1037 | 11 | |
| 134 | 10 | |
| 1175 | 8 | |
| 1175 | 11 | |
| 945 | 8 | |
| 612 | 11 | |
| 1074 | 8 | |
| 999 | 8 | |
| 316 | 9 | |
| 122 | 11 | |
| 1156 | 8 | |
| 1156 | 10 | |
| 1119 | 9 | 0.0002 |
| 1119 | 11 | |
| 230 | 8 | |
| 391 | 10 | |
| 95 | 9 | 0.0002 |
| 1130 | 10 | 0.0002 |
| 650 | 8 | |
| 1065 | 8 | |
| 1077 | 10 | |
| 1121 | 9 | |
| 702 | 9 | |
| 601 | 10 | 0.0003 |
| 1150 | 10 | |
| 1150 | 11 | |
| 1234 | 10 | |
| 1241 | 8 | |
| 232 | 10 | |
| 232 | 11 | |
| 1102 | 10 | 0.0003 |
| 1102 | 11 | |
| 66 | 8 | |
| 525 | 10 | |
| 749 | 8 | |
| 128 | 11 | |
| 491 | 9 | 0.0046 |
| 709 | 8 | |
| 239 | 10 | |
| 239 | 11 | |
| 583 | 8 | |
| 583 | 9 | |
| 527 | 8 | |
| 527 | 10 | |
| 75 | 9 | |
| 820 | 11 | |
| 1225 | 8 | |
| 164 | 10 | |
| 164 | 11 | |
| 1028 | 9 | |
| 1200 | 9 | |
| 446 | 11 | |
| 548 | 10 | |
| 548 | 11 | |
| 57 | 8 | |
| 81 | 8 | |
| 828 | 8 | |
| 178 | 11 | |
| 160 | 11 | |
| 106 | 8 | |
| 106 | 10 | |
| 484 | 9 | |
| 799 | 11 | |
| 141 | 10 | 0.2000 |
| 795 | 9 | 0.0110 |
| 711 | 11 | |
| 213 | 9 | |
| 24 | 9 | 0.0007 |
| 24 | 11 | |
| 429 | 9 | |
| 93 | 8 | |
| 93 | 11 | |
| 90 | 9 | 0.0029 |
| 90 | 11 | |
| 54 | 11 | |
| 190 | 11 | |
| 647 | 11 | |
| 354 | 11 | |
| 330 | 10 | |
| 330 | 11 | |
| 844 | 11 | |
| 968 | 9 | |
| 968 | 11 | |
| 898 | 11 | |
| 1230 | 8 | |
| 1230 | 9 | |
| 536 | 10 | |
| 432 | 9 | |
| 432 | 10 | |
| 103 | 10 | 0.0003 |
| 103 | 11 | |
| 434 | 8 | |
| 713 | 9 | 0.0007 |
| 713 | 10 | 0.0570 |
| 100 | 9 | |
| 868 | 10 | 0.0017 |
| 868 | 11 | |
| 34 | 9 | |
| 98 | 11 | |
| 840 | 8 | |
| 840 | 9 | |
| 840 | 10 | 0.1800 |
| 978 | 8 | |
| 978 | 9 | 0.0001 |
| 456 | 11 | |
| 143 | 8 | |
| 1072 | 10 | |
| 217 | 9 | |
| 217 | 10 | 0.0068 |
| 340 | 10 | |
| 545 | 8 | |
| 545 | 10 | 0.0350 |
| 358 | 8 | |
| 358 | 11 | |
| 310 | 9 | |
| 633 | 8 | |
| 294 | 8 | |
| 294 | 10 | |
| 250 | 8 | |
| 250 | 9 | |
| 250 | 11 | |
| 380 | 11 | |
| 728 | 8 | |
| 728 | 9 | |
| 703 | 8 | |
| 703 | 11 | |
| 261 | 10 | |
| 463 | 8 | |
| 463 | 11 | |
| 602 | 9 | |
| 893 | 9 | |
| 373 | 9 | |
| 418 | 8 | |
| 457 | 10 | |
| 214 | 8 | |
| 281 | 8 | |
| 281 | 9 | 0.0002 |
| 281 | 11 | |
| 208 | 10 | −0.0002 |
| 1235 | 9 | |
| 22 | 11 | |
| 423 | 10 | 0.0170 |
| 573 | 9 | |
| 323 | 8 | |
| 323 | 11 | |
| 1132 | 8 | |
| 233 | 9 | |
| 233 | 10 | |
| 29 | 9 | |
| 278 | 11 | |
| 290 | 9 | |
| 1236 | 8 | |
| 130 | 9 | |
| 245 | 10 | |
| 27 | 8 | |
| 27 | 11 | |
| 407 | 8 | |
| 948 | 10 | 0.0130 |
| 166 | 8 | |
| 166 | 9 | |
| 166 | 10 | 0.0430 |
| 402 | 8 | |
| 402 | 10 | 0.0001 |
| 1060 | 11 | |
| 182 | 9 | 0.0004 |
| 182 | 10 | |
| 1172 | 11 | |
| 357 | 8 | |
| 357 | 9 | |
| 218 | 8 | |
| 218 | 9 | 0.0004 |
| 218 | 11 | |
| 1117 | 11 | |
| 479 | 8 | |
| 479 | 9 | 0.0006 |
| 793 | 11 | |
| 911 | 8 | |
| 911 | 10 | |
| 911 | 11 | |
| 585 | 11 | |
| 597 | 9 | 0.0100 |
| 219 | 8 | |
| 219 | 10 | |
| 314 | 11 | |
| 25 | 8 | |
| 25 | 10 | |
| 341 | 9 | |
| 341 | 11 | |
| 635 | 10 | |
| 1085 | 10 | |
| 1085 | 11 | |
| 399 | 11 | |
| 670 | 8 | |
| 670 | 9 | |
| 424 | 9 | |
| 424 | 11 | |
| 505 | 8 | |
| 308 | 11 | |
| 777 | 8 | |
| 988 | 10 | |
| 430 | 8 | |
| 430 | 11 | |
| 725 | 11 | |
| 666 | 11 | |
| 84 | 9 | 0.0033 |
| 153 | 11 | |
| 546 | 9 | 0.0012 |
| 754 | 9 | 0.4000 |
| 754 | 10 | |
| 851 | 8 | |
| 851 | 10 | 0.0820 |
| 773 | 9 | 0.0580 |
| 973 | 8 | |
| 973 | 9 | −0.0002 |
| 296 | 8 | |
| 322 | 9 | 0.0002 |
| 574 | 8 | |
| 129 | 10 | 0.0002 |
| 356 | 9 | |
| 356 | 10 | |
| 910 | 9 | |
| 910 | 11 | |
| 272 | 8 | |
| 669 | 8 | |
| 669 | 9 | 0.1100 |
| 669 | 10 | 0.0030 |
| 987 | 11 | |
| 1180 | 8 | |
| 1180 | 11 | |
| 55 | 10 | 0.0024 |
| 664 | 8 | |
| 825 | 11 | |
| 1223 | 8 | |
| 1223 | 10 | |
| 482 | 9 | |
| 482 | 11 | |
| 739 | 9 | 0.0002 |
| 452 | 8 | |
| 888 | 9 | −0.0002 |
| 888 | 10 | 0.0085 |
| 888 | 11 | |
| 959 | 8 | |
| 959 | 10 | −0.0002 |
| 959 | 11 | |
| 803 | 9 | |
| 343 | 9 | |
| 908 | 11 | |
| 835 | 9 | |
| 835 | 10 | 0.0003 |
| 64 | 10 | |
| 1196 | 8 | |
| 1196 | 9 | |
| 1023 | 8 | |
| 1023 | 9 | |
| 289 | 10 | |
| 83 | 10 | 0.0043 |
| 772 | 10 | 0.0100 |
| 554 | 11 | |
| 1139 | 8 | |

[0496] TABLE XVII
HER2/NEU A11 Motif Peptides with Binding Data

| | No. of | |
|---|---|---|
| Position | Amino Acids | A*1101 |
| 241 | 8 | |
| 241 | 9 | |
| 1094 | 11 | |
| 847 | 8 | |
| 1159 | 11 | |
| 191 | 10 | |
| 510 | 8 | |
| 510 | 10 | |
| 622 | 11 | |
| 879 | 9 | |
| 581 | 9 | |
| 581 | 10 | |
| 581 | 11 | |
| 1186 | 11 | |
| 1212 | 10 | 0.0003 |
| 1212 | 11 | |
| 1163 | 9 | |
| 242 | 8 | |
| 221 | 8 | |
| 1039 | 8 | |
| 1039 | 9 | |
| 1039 | 10 | |
| 775 | 11 | |
| 890 | 8 | |
| 890 | 9 | 0.0006 |
| 466 | 8 | |
| 492 | 8 | |
| 180 | 9 | 0.0005 |
| 180 | 11 | |
| 705 | 9 | 0.0006 |
| 359 | 10 | |
| 359 | 11 | |
| 763 | 10 | |
| 293 | 9 | 0.0074 |
| 293 | 11 | |
| 37 | 11 | |
| 997 | 9 | 0.0004 |
| 997 | 10 | 0.0670 |
| 240 | 9 | 0.0021 |
| 240 | 10 | |
| 220 | 9 | −0.0002 |
| 252 | 9 | |
| 805 | 10 | 0.0001 |
| 826 | 10 | 0.0001 |
| 334 | 10 | 0.0002 |
| 195 | 9 | −0.0001 |
| 26 | 9 | 0.0005 |
| 630 | 11 | |
| 947 | 11 | |
| 311 | 8 | |
| 584 | 8 | |
| 596 | 10 | 0.0042 |
| 504 | 9 | |
| 528 | 9 | 0.0310 |
| 295 | 9 | 0.0004 |
| 251 | 10 | |
| 638 | 10 | |
| 1087 | 10 | |
| 880 | 8 | |
| 326 | 8 | |
| 326 | 11 | |
| 871 | 8 | |
| 76 | 8 | |
| 845 | 10 | 0.0007 |
| 1089 | 8 | |
| 933 | 8 | |
| 821 | 11 | |
| 607 | 9 | 0.0100 |
| 1016 | 8 | |
| 1013 | 11 | |
| 962 | 9 | −0.0002 |
| 165 | 10 | |
| 165 | 11 | |
| 185 | 9 | |
| 1144 | 10 | 0.0001 |
| 950 | 8 | |
| 580 | 10 | |
| 580 | 11 | |
| 543 | 10 | |
| 503 | 10 | |
| 210 | 8 | |
| 325 | 9 | |
| 837 | 8 | |
| 975 | 11 | |
| 507 | 11 | |
| 1154 | 8 | |
| 147 | 11 | |
| 930 | 8 | |
| 930 | 11 | |
| 460 | 10 | |
| 460 | 11 | |
| 265 | 10 | 0.0002 |
| 914 | 8 | |
| 914 | 10 | 0.0002 |
| 971 | 8 | |
| 971 | 11 | |
| 757 | 9 | |
| 744 | 10 | |
| 892 | 10 | |
| 280 | 9 | −0.0002 |
| 280 | 10 | 0.0003 |
| 207 | 11 | |
| 717 | 8 | |
| 874 | 10 | 0.0001 |
| 40 | 8 | |
| 40 | 9 | |
| 40 | 11 | |
| 401 | 9 | 0.0002 |
| 401 | 11 | |
| 79 | 10 | |
| 321 | 10 | 0.0001 |
| 595 | 11 | |
| 1086 | 11 | |
| 291 | 11 | |
| 1187 | 10 | |
| 671 | 8 | |
| 671 | 11 | |
| 73 | 11 | |
| 258 | 10 | |
| 1213 | 9 | 0.0002 |
| 1213 | 10 | 0.0010 |
| 976 | 10 | 0.0010 |
| 899 | 10 | 0.0005 |
| 729 | 8 | |
| 1038 | 8 | |
| 1038 | 9 | 0.0043 |
| 1038 | 10 | |
| 1038 | 11 | |
| 919 | 11 | |
| 704 | 10 | 0.0041 |
| 1231 | 8 | |
| 292 | 10 | 0.0001 |
| 131 | 8 | |
| 1164 | 8 | |
| 1189 | 8 | |
| 804 | 8 | |
| 804 | 11 | |
| 1088 | 9 | |
| 1015 | 9 | |
| 1201 | 8 | |
| 1188 | 9 | 0.0001 |
| 135 | 9 | |
| 1040 | 8 | |
| 1040 | 9 | |
| 672 | 10 | 0.0014 |
| 449 | 8 | |
| 449 | 11 | |
| 737 | 11 | |
| 508 | 10 | 0.0001 |
| 464 | 10 | |
| 1062 | 11 | |
| 447 | 10 | 0.0001 |
| 344 | 8 | |
| 344 | 11 | |
| 549 | 10 | 0.0003 |
| 549 | 11 | |
| 1097 | 8 | |
| 136 | 8 | |
| 346 | 9 | −0.0002 |
| 832 | 9 | 0.0002 |
| 1041 | 8 | |
| 309 | 10 | |
| 727 | 9 | 0.0001 |
| 727 | 10 | 0.1300 |
| 462 | 8 | |
| 462 | 9 | |
| 1239 | 10 | 0.0022 |
| 104 | 9 | 0.0280 |
| 327 | 10 | 0.6100 |
| 776 | 9 | 0.0066 |
| 603 | 8 | |
| 668 | 9 | 0.0890 |
| 668 | 10 | 0.0330 |
| 668 | 11 | |
| 878 | 10 | 0.0008 |
| 267 | 8 | |
| 1104 | 8 | |
| 1104 | 9 | |
| 257 | 11 | |
| 42 | 9 | 0.0002 |
| 88 | 11 | |
| 470 | 9 | |
| 632 | 9 | 0.0007 |
| 249 | 9 | |
| 260 | 8 | |
| 478 | 10 | 0.0720 |
| 858 | 11 | |
| 809 | 8 | |
| 961 | 8 | |
| 961 | 10 | |
| 184 | 10 | |
| 949 | 9 | |
| 673 | 9 | 0.0097 |
| 673 | 11 | |
| 714 | 8 | |
| 714 | 9 | 0.0023 |
| 714 | 11 | |
| 148 | 10 | 0.0005 |
| 894 | 8 | |
| 167 | 8 | |
| 167 | 9 | 0.3100 |
| 450 | 10 | 0.0027 |
| 861 | 8 | |
| 762 | 11 | |
| 333 | 8 | |
| 333 | 11 | |
| 957 | 10 | |
| 591 | 9 | |
| 640 | 8 | |
| 150 | 8 | |
| 1096 | 9 | |
| 831 | 10 | |
| 228 | 10 | |
| 1238 | 11 | |
| 747 | 10 | 0.0099 |
| 681 | 8 | 0.0004 |
| 681 | 9 | 0.0018 |
| 860 | 9 | 0.2400 |
| 32 | 11 | |
| 753 | 10 | 0.2200 |
| 846 | 9 | 0.0285 |
| 509 | 9 | 0.0003 |
| 509 | 11 | |
| 253 | 8 | |
| 465 | 9 | |
| 179 | 10 | 0.0003 |
| 161 | 10 | 0.0063 |
| 637 | 11 | |
| 807 | 8 | |
| 807 | 10 | |
| 870 | 8 | |
| 870 | 9 | |
| 43 | 8 | |
| 485 | 11 | |
| 448 | 9 | |
| 345 | 10 | |
| 726 | 10 | 0.0003 |
| 726 | 11 | |
| 461 | 9 | |
| 461 | 10 | |
| 667 | 10 | |
| 667 | 11 | |
| 85 | 8 | |
| 183 | 8 | |
| 183 | 11 | |
| 674 | 8 | |
| 674 | 10 | 0.0001 |
| 674 | 11 | |
| 154 | 10 | 0.0002 |
| 806 | 9 | 0.0006 |
| 806 | 11 | |
| 869 | 9 | 0.0001 |
| 869 | 10 | |
| 822 | 10 | 0.1400 |
| 800 | 10 | |
| 915 | 9 | 0.0003 |
| 823 | 9 | |
| 1173 | 10 | 0.0003 |
| 422 | 11 | |
| 608 | 8 | |
| 1131 | 9 | 0.0061 |
| 181 | 8 | |
| 181 | 10 | 0.0005 |
| 841 | 9 | 0.0014 |
| 852 | 9 | 0.0700 |
| 972 | 10 | 0.0330 |
| 796 | 8 | |
| 774 | 8 | |
| 774 | 11 | |
| 889 | 8 | |
| 889 | 9 | 0.0237 |
| 889 | 10 | 0.0003 |
| 1014 | 10 | 0.0002 |
| 960 | 9 | 0.0006 |
| 960 | 11 | |
| 833 | 8 | |
| 833 | 11 | |
| 916 | 8 | |
| 556 | 9 | |
| 360 | 9 | 0.0036 |
| 360 | 10 | 0.0056 |
| 427 | 8 | |
| 427 | 11 | |
| 471 | 8 | |
| 758 | 8 | |
| 745 | 10 | 0.0007 |
| 850 | 9 | |
| 850 | 11 | |
| 1215 | 8 | |
| 1211 | 11 | |
| 1162 | 8 | |
| 1162 | 10 | −0.0002 |
| 1035 | 10 | |
| 1035 | 11 | |
| 927 | 11 | |
| 996 | 10 | 0.0001 |
| 996 | 11 | |
| 625 | 8 | |
| 194 | 10 | |
| 932 | 9 | |
| 606 | 10 | |
| 1143 | 11 | |
| 1037 | 8 | |
| 1037 | 9 | |
| 1037 | 10 | |
| 1037 | 11 | |
| 134 | 10 | |
| 1175 | 8 | |
| 945 | 8 | |
| 999 | 8 | |
| 1119 | 9 | 0.0002 |
| 230 | 8 | |
| 95 | 9 | 0.0001 |
| 1130 | 10 | 0.0002 |
| 707 | 10 | |
| 1065 | 8 | |
| 601 | 10 | 0.0003 |
| 1241 | 8 | |
| 1102 | 10 | 0.0001 |
| 1102 | 11 | |
| 749 | 8 | |
| 128 | 11 | |
| 491 | 9 | 0.0010 |
| 709 | 8 | |
| 239 | 10 | |
| 239 | 11 | |
| 583 | 8 | |
| 583 | 9 | |
| 527 | 10 | |
| 75 | 9 | |
| 164 | 11 | |
| 1200 | 9 | |
| 446 | 11 | |
| 548 | 11 | |
| 57 | 8 | |
| 81 | 8 | |
| 828 | 8 | |
| 178 | 11 | |
| 160 | 11 | |
| 799 | 11 | |
| 141 | 10 | 0.0130 |
| 795 | 9 | 0.0039 |
| 711 | 11 | |
| 426 | 9 | |
| 24 | 9 | 0.0520 |
| 24 | 11 | |
| 429 | 9 | |
| 93 | 8 | |
| 93 | 11 | |
| 90 | 9 | 0.0005 |
| 90 | 11 | |
| 54 | 11 | |
| 190 | 11 | |
| 330 | 11 | |
| 844 | 11 | |
| 968 | 11 | |
| 898 | 11 | |
| 1230 | 9 | |
| 536 | 10 | |
| 432 | 10 | |
| 103 | 10 | 0.0015 |
| 434 | 8 | |
| 713 | 9 | 0.0038 |
| 713 | 10 | 0.1100 |
| 868 | 10 | 0.0001 |
| 868 | 11 | |
| 34 | 9 | |
| 840 | 10 | 0.0001 |
| 978 | 8 | |
| 487 | 9 | |
| 849 | 10 | |
| 143 | 8 | |
| 217 | 10 | 0.0130 |
| 340 | 10 | |
| 545 | 8 | |
| 515 | 10 | 0.0050 |
| 358 | 11 | |
| 310 | 9 | |
| 633 | 8 | |
| 294 | 8 | |
| 294 | 10 | |
| 250 | 8 | |
| 250 | 11 | |
| 728 | 8 | |
| 728 | 9 | |
| 703 | 11 | |
| 463 | 8 | |
| 463 | 11 | |
| 602 | 9 | |
| 893 | 9 | |
| 281 | 8 | |
| 281 | 9 | 0.0003 |
| 208 | 10 | 0.0020 |
| 22 | 11 | |
| 423 | 10 | 0.0750 |
| 323 | 8 | |
| 323 | 11 | |
| 1132 | 8 | |
| 278 | 11 | |
| 130 | 9 | |
| 27 | 8 | |
| 948 | 10 | 0.1200 |
| 166 | 9 | |
| 166 | 10 | 3.6000 |
| 402 | 8 | |
| 402 | 10 | 0.0001 |
| 182 | 9 | 0.0005 |
| 1172 | 11 | |
| 186 | 8 | |
| 218 | 9 | 0.0230 |
| 218 | 11 | |
| 1117 | 11 | |
| 479 | 9 | 0.0072 |
| 793 | 11 | |
| 911 | 11 | |
| 597 | 9 | −0.0002 |
| 219 | 8 | |
| 219 | 10 | |
| 25 | 8 | |
| 25 | 10 | |
| 341 | 9 | |
| 341 | 11 | |
| 399 | 11 | |
| 670 | 8 | |
| 670 | 9 | |
| 424 | 9 | |
| 424 | 11 | |
| 505 | 8 | |
| 308 | 11 | |
| 777 | 8 | |
| 430 | 8 | |
| 725 | 11 | |
| 666 | 11 | |
| 84 | 9 | 0.0007 |
| 153 | 11 | |
| 546 | 9 | 0.0002 |
| 754 | 9 | 0.0130 |
| 851 | 8 | |
| 851 | 10 | 0.0072 |
| 773 | 9 | 0.0079 |
| 555 | 10 | |
| 529 | 8 | |
| 973 | 9 | 0.0021 |
| 296 | 8 | |
| 322 | 9 | 0.0140 |
| 129 | 10 | 0.0005 |
| 669 | 8 | |
| 669 | 9 | 0.7200 |
| 669 | 10 | 0.0160 |
| 55 | 10 | 0.0110 |
| 825 | 11 | |
| 1223 | 8 | |
| 482 | 9 | |
| 730 | 9 | 0.0001 |
| 452 | 8 | |
| 888 | 9 | −0.0002 |
| 888 | 10 | 0.0016 |
| 888 | 11 | |
| 959 | 8 | |
| 959 | 10 | 0.0002 |
| 803 | 9 | |
| 343 | 9 | |
| 835 | 9 | |
| 835 | 10 | 0.0001 |
| 83 | 10 | 0.0013 |
| 772 | 10 | 0.0120 |
| 554 | 11 | |
| 1139 | 8 | |

[0497] TABLE XVIII
HER2/NEU A24 Motif Peptides with Binding Data

| | No. of | |
|---|---|---|
| Position | Amino Acids | A*2401 |
| 1216 | 8 | 0.0039 |
| 730 | 9 | 0.0002 |
| 730 | 10 | 0.0010 |
| 730 | 11 | 0.0008 |
| 1212 | 9 | 0.0011 |
| 705 | 10 | 0.0002 |
| 705 | 11 | −0.0003 |
| 414 | 9 | 0.0041 |
| 440 | 9 | 0.1300 |
| 440 | 11 | 0.0230 |
| 475 | 8 | 0.0190 |
| 475 | 11 | 0.0003 |
| 826 | 11 | −0.0003 |
| 342 | 9 | 0.0180 |
| 162 | 8 | 0.0120 |
| 162 | 11 | 0.0016 |
| 863 | 8 | 0.0005 |
| 863 | 10 | 0.0002 |
| 363 | 8 | −0.0003 |
| 363 | 9 | 0.0003 |
| 876 | 11 | −0.0003 |
| 1022 | 9 | 0.0014 |
| 1022 | 10 | 0.0120 |
| 553 | 9 | 0.0061 |
| 1091 | 8 | −0.0003 |
| 1091 | 11 | −0.0003 |
| 832 | 10 | |
| 408 | 8 | 0.0044 |
| 257 | 10 | 0.0002 |
| 370 | 8 | 0.0120 |
| 172 | 8 | −0.0003 |
| 172 | 10 | 0.0022 |
| 954 | 8 | 0.0210 |
| 738 | 11 | 0.0027 |
| 887 | 8 | 0.0080 |
| 887 | 9 | 0.0150 |
| 684 | 8 | 0.0024 |
| 107 | 8 | 0.0006 |
| 107 | 11 | 0.0006 |
| 485 | 9 | 0.0002 |
| 485 | 10 | 0.0014 |
| 800 | 8 | 0.0076 |
| 410 | 10 | 0.0840 |
| 197 | 9 | 0.0011 |
| 922 | 10 | 0.0005 |
| 780 | 9 | 0.1700 |
| 780 | 11 | 0.0320 |
| 711 | 10 | |
| 968 | 9 | 0.0180 |
| 898 | 9 | 0.0110 |
| 985 | 10 | 0.0002 |
| 978 | 9 | 0.0032 |
| 8 | 8 | 0.0250 |
| 8 | 9 | 1.3000 |
| 1111 | 10 | 0.0120 |
| 281 | 11 | 0.0180 |
| 451 | 9 | −0.0003 |
| 451 | 11 | 0.0036 |
| 907 | 9 | 0.1200 |
| 834 | 8 | 0.0059 |
| 609 | 8 | 0.3200 |
| 917 | 10 | 0.0002 |
| 686 | 11 | −0.0003 |
| 63 | 9 | 0.0380 |
| 63 | 11 | 8.9000 |
| 399 | 8 | −0.0003 |
| 424 | 8 | −0.0003 |
| 905 | 9 | 0.0800 |
| 905 | 11 | 0.0920 |
| 951 | 9 | 0.1600 |
| 951 | 11 | 1.8000 |
| 888 | 8 | −0.0003 |
| 959 | 11 | 0.0011 |
| 952 | 8 | 0.0009 |
| 952 | 10 | 0.0019 |

[0498] TABLE XIX
HER2/NEU DR Super Motif Peptides with Binding Data

| Core | Exemplary | | | | | | | | | | | | | | | |
|---|---|---|---|---|---|---|---|---|---|---|---|---|---|---|---|---|
| Sequence | Sequence | Position | DR1 | DR2wB1 | DR2w2B2 | DR3 | DR4w4 | DR4w15 | DR5w11 | DR5w12 | DR6w19 | DR7 | DR8w2 | DR9 | DRw53 | SEQ ID NO. |
| YNYLSTDVG | ACPYNYLSTDVGSCT | 298 | | | | | | | | | | | | | | 3720 |
| VLRENTSPK | AIKVLRENTSPKANK | 751 | | | | 0.0075 | | | | | | | | | | 3721 |
| LQSLPTHDP | AKGLQSLPTHDPSPL | 1095 | | | | | | | | | | | | | | 3722 |
| YDGIPAREI | AKPYDGIPAREIPDL | 920 | | | | | | | | | | | | | | 3723 |
| LDIDETEYH | ARLLDIDETEYHADG | 867 | 0.0001 | −0.0006 | −0.0007 | 0.3100 | −0.0055 | | −0.0008 | | −0.0001 | −0.0017 | −0.0009 | | | 3724 |
| VLVKSPNHV | ARNVLVKSPNHVKIT | 848 | | | | | | | | | | | | | | 3725 |
| LTSHSAVV | ASPLTSHSAVVGIL | 648 | 0.0890 | 0.0950 | 0.0037 | 0.0010 | −0.0025 | | −0.0005 | | 0.0480 | 0.0350 | −0.0004 | | | 3726 |
| LTLOGLGIS | AYSLTLQGLGISWLG | 440 | | | | | | | | | | | | | | 3727 |
| MAGVGSPYV | AYVMAGVGSPYVSRL | 771 | | | | | | | | | | | | | | 3728 |
| IFGSLAFLP | CKKIFGSLAFLPESF | 367 | 0.2400 | 0.0070 | 0.0016 | 0.0010 | −0.0025 | | −0.0005 | | 0.0034 | 0.0270 | −0.0004 | | | 3729 |
| FNHSGICEL | CLHFNHSGICELHCP | 255 | | | | | | | | | | | | | | 3730 |
| IAKGMSYLE | CMQIAKGMSYLEDVR | 826 | | | | | | | | | | | | | | 3731 |
| LVTYNTDTF | CPALVTYNTDTFESM | 268 | | | | | | | | | | | | | | 3732 |
| LTRTVCAGG | CQSLTRTVCAGGCAR | 212 | | | | | | | | | | | | | | 3733 |
| LDDKGCPAE | CVDLDDKGCPAEQRA | 634 | | | | | | | | | | | | | | 3734 |
| LGMEHLREV | CYGLGMEHLREVRAV | 342 | | | | 0.0083 | | | | | | | | | | 3735 |
| YVMAGVGSP | DEAYVMAGVGSPYVS | 769 | 0.0500 | 0.0029 | 0.0240 | 0.0010 | 0.2300 | | 0.0027 | | 0.0020 | 0.2000 | 0.0570 | | | 3736 |
| VGEGLACHQ | DECVGEGLACHQLCA | 502 | | | | | | | | | | | | | | 3737 |
| LGMGAAKGL | DGDLGMGAAKGLQSL | 1087 | | | | | | | | | | | | | | 3738 |
| VAPLTCSPQ | DGYVAPLTCSPQPEY | 1125 | | | | | | | | | | | | | | 3739 |
| LGLEPSEEE | DLTLGLEPSEEEAPR | 1058 | | | | −0.0025 | | | | | | | | | | 3740 |
| LRLPASPET | DMKLRLPASPETHLD | 30 | 0.0010 | | | | −0.0025 | | | | | −0.0013 | | | | 3741 |
| FCVARCPSG | DPPFCVARCPSGVKP | 592 | | | | | | | | | | | | | | 3742 |
| FYRSLLEDD | DSTFYRSLLEDDDMG | 1001 | | | | | | | | | | | | | | 3743 |
| LVHRDLAAR | DVRLVHRDLAARNVL | 838 | | | | | | | | | | | | | | 3744 |
| MIMVKCWMI | DVYMIMVKCWMIDSE | 950 | 0.0280 | 0.0047 | 0.0042 | 0.0010 | 0.0570 | | 0.0220 | | −0.0003 | 0.1300 | 0.0450 | | | 3745 |
| VLQGLPREY | ECRVLQGLPREYVNA | 543 | | | | | | | | | | | | | | 3746 |
| YALAVLDNG | EDNYALAVLDNGDPL | 109 | | | | | | | | | | | | | | 3747 |
| LPAARPAGA | EGPLPAARPAGATLE | 1154 | | | | | | | | | | | | | | 3748 |
| YTFGASCVT | EGRYTFGASCVTACP | 286 | | | | | | | | | | | | | | 3749 |
| YLPTNASLS | ELTYLPTNASLSFLQ | 61 | | | | | | | | | | | | | | 3750 |
| LRRRFTHQS | ESILRRRFTHQSDVW | 892 | | | | | | | | | | | | | | 3751 |
| LRKVKVLGS | ELELRKVKVLGSGAF | 717 | 0.0160 | 0.0019 | 0.0052 | 0.0045 | 0.0350 | | 0.0061 | | 0.0014 | 0.0380 | 0.0250 | | | 3752 |
| LVEPLTPSG | ETELVEPLTPSGAMP | 693 | 0.0060 | | | | −0.0025 | | | | | −0.0013 | | | | 3753 |
| LVSEFSRMA | FRELVSEFSRMARDP | 969 | | | | 0.0710 | | | | | | | | | | 3754 |
| IQNEDLGPA | FVVIQNEDLGPASPL | 986 | | | | −0.0025 | | | | | | | | | | 3755 |
| LERPKTLSP | GATLERPKTLSPGKN | 1164 | | | | | | | | | | | | | | 3756 |
| VVQGNLELT | GCQVVQGNLELTYLP | 52 | | | | | | | | | | | | | | 3757 |
| LNNTTPVTG | GDPLNNTTPVTGASP | 120 | | | | | | | | | | | | | | 3758 |
| LACHQLCAR | GEGLACHQLCARGHC | 506 | | | | | | | | | | | | | | 3759 |
| VKIPVAIKV | GENVKIPVAIKVLRE | 743 | 0.0630 | 0.0047 | 0.0034 | 0.0098 | −0.0032 | | −0.0005 | | 0.0004 | 0.0310 | 0.0010 | | | 3760 |
| LPQPPICTI | GERLPQPPICTIDVY | 938 | −0.0005 | | | | −0.0032 | | | | | −0.0011 | | | | 3761 |
| VPIKWMALE | GGKVPIKWMALESIL | 881 | | | | | | | | | | | | | | 3762 |
| LIQRNPQLC | GGVLIQRNPQLCYQD | 151 | | | | | | | | | | | | | | 3763 |
| WGPGPTQCV | GHCWGPGPTQCVNCS | 518 | | | | | | | | | | | | | | 3764 |
| WLGLRSLRE | GISWLGLRSLRELGS | 449 | | | | | | | | | | | | | | 3765 |
| LIHHNTHLC | GLALIHHNTHLCFVH | 464 | | | | | | | | | | | | | | 3766 |
| ISWLGLRSL | GLGISWLGLRSLREL | 447 | | | | | | | | | | | | | | 3767 |
| LALLPPGAA | GLLLALLPPGAASTQ | 10 | | | | | | | | | | | | | | 3768 |
| VFDGDLGMG | GSDVFDGDLGMGAAK | 1082 | | | | | | | | | | | | | | 3769 |
| YVSRLLGIC | GSPYVSRLLGICLTS | 778 | | | | | | | | | | | | | | 3770 |
| MKLRLPASP | GTDMKLRLPASPETH | 28 | 0.0010 | | | | −0.0025 | | | | | −0.0013 | | | | 3771 |
| YKGIWIPDG | GTVYKGIWIPDGENV | 732 | | | | | | | | | | | | | | 3772 |
| VWELMTFGA | GVTVWELMTFGAKPY | 909 | 1.4000 | | | | 0.0330 | | | | | 0.0170 | | | | 3773 |
| YISAWPDSL | GYLYISAWPDSLPDL | 408 | | | | | | | | | | | | | | 3774 |
| FVHTVPWDQ | HLCFVHTVPWDQLFR | 473 | | | | | | | | | | | | | | 3775 |
| VRQVPLQRL | HNQVRQVPLQRLRIV | 88 | | | | | | | | | | | | | | 3776 |
| LAARNVLVK | HRDLAARNVYLVKSPN | 843 | | | | | | | | | | | | | | 3777 |
| ICELHCPAL | HSGICELHCPALVTY | 260 | | | | | | | | | | | | | | 3778 |
| ITDFGLARL | HVKITDFGLARLLDI | 858 | | | | | | | | | | | | | | 3779 |
| LHCPALVTY | ICELHCPALVTYNTD | 263 | | | | | | | | | | | | | | 3780 |
| IDVYMIMVK | ICTIDVYMIMVKCWM | 946 | | | | | | | | | | | | | | 3781 |
| LRENTSPKA | IKVLRENTSPKANKE | 752 | −0.0005 | | | | −0.0032 | | | | | −0.0011 | | | | 3782 |
| MALESILRR | IKWMALESILRRRFT | 886 | 0.9500 | | | | 0.0400 | | | | | 0.0040 | | | | 3783 |
| VVVLGVVFG | ILLVVVLGVVFGILI | 661 | | | | | | | | | | | | | | 3784 |
| VQGYVLIAH | IQEVQGYVLIAHNQV | 77 | | | | | | | | | | | | | | 3785 |
| YTMRRLLQE | IRKYTMRRLLQETEL | 682 | | | | | | | | | | | | | | 3786 |
| VYGILLVVV | ISAVVGILLVVVLGV | 655 | | | | | | | | | | | | | | 3787 |
| WPDSLPDLS | ISAWPDSLPDLSVFQ | 412 | | | | | | | | | | | | | | 3788 |
| LGLRSLREL | ISWLGLRSLRELGSG | 450 | | | | | | | | | | | | | | 3789 |
| FGLARLLDI | ITDFGLARLLDIDET | 861 | 0.0048 | | | | −0.0032 | | | | | −0.0011 | | | | 3790 |
| YLYISAWPD | ITGYLYISAWPDSLP | 406 | | | | | | | | | | | | | | 3791 |
| MIDSECRPR | KCWMIDSECRPRFRE | 957 | | | | | | | | | | | | | | 3792 |
| FAFGGAVEN | KDVFAFGGAVENPEY | 1182 | | | | | | | | | | | | | | 3793 |
| LDEAYVMAG | KEILDEAYVMAGVGS | 765 | 0.0036 | | | | 0.0073 | | | | | −0.0011 | | | | 3794 |
| LPTDCCHEQ | KGPLPTDCCHEQCAA | 228 | | | | −0.0027 | | | | | | | | | | 3795 |
| VAIKVLREN | KIPVAIKVLRENTSP | 747 | | | | | | | | | | | | | | 3796 |
| LSYMPIWKF | KPDLSYMPIWKFPDE | 605 | 0.0330 | | | | −0.0025 | | | | | 0.0029 | | | | 3797 |
| VLGSGAGFT | KVKVLGSGAFGTVYK | 722 | | | | | | | | | | | | | | 3798 |
| IKWMALESI | KVPIKWMALESILRR | 883 | 2.2000 | 2.7000 | 2.1000 | 0.0620 | 0.0690 | | 0.0073 | | 0.0031 | 0.0190 | 0.0079 | | | 3799 |
| LCRWGLLLA | LAALCRWGLLLALLP | 3 | | | | | | | | | | | | | | 3800 |
| LHFNHSGIC | LACLHFNHSGICELH | 253 | | | | | | | | | | | | | | 3801 |
| LPPGAASTQ | LALLPPGAASTQVCT | 13 | | | | | | | | | | | | | | 3802 |
| LDNGDPLNN | LAVLDNGDPLNNTTP | 114 | | | | | | | | | | | | | | 3803 |
| WGLLLALLP | LCRWGLLLALLPPGA | 6 | 0.0940 | | | | −0.0025 | | | | | 0.0021 | | | | 3804 |
| VFGILIKRR | LGVVFGILIKRRQQK | 667 | | | | | | | | | | | | | | 3805 |
| LLPPGAAST | LLALLPPGAASTQVC | 12 | | | | | | | | | | | | | | 3806 |
| ICLTSTVQL | LLGICLTSTVQLVTQ | 785 | | | | | | | | | | | | | | 3807 |
| WCMQIAKGM | LLNWCMQIAKGMSYL | 822 | 0.8400 | 0.0057 | 1.2000 | 0.0093 | 0.0011 | | 0.4000 | | 0.0390 | 0.1200 | 0.4100 | | | 3808 |
| VVLGVVFGI | LLVVVLGVVFGILIK | 662 | −0.0008 | | | | −0.0025 | | | | | 0.0019 | | | | 3809 |
| LGISWLGLR | LQGLGISWLGLRSLR | 445 | | | | | | | | | | | | | | 3810 |
| LPREYVNAR | LQGLPREYVNARHCL | 547 | | | | −0.0027 | | | | | | | | | | 3811 |
| YSEDPTVPL | LQRYSEDPTVPLPSE | 1109 | | | | 0.0270 | | | | | | | | | | 3812 |
| LPTHDPSPL | LQSLPTHDPSPLQRY | 1098 | | | | | | | | | | | | | | 3813 |
| IRGRILHNG | LQVIRGRILHNGAYS | 428 | | | | | | | | | | | | | | 3814 |
| LGSGLALIH | LRELGSGLALIHHNT | 458 | 0.0310 | | | | −0.0025 | | | | | −0.0013 | | | | 3815 |
| LQLRSLTEI | LRELQLRSLTEILKG | 137 | | | | | | | | | | | | | | 3816 |
| VRAVTSANI | LREVRAVTSANIQEF | 350 | | | | | | | | | | | | | | 3817 |
| VRGTQLFED | LRIVRGTQLFEDNYA | 99 | | | | | | | | | | | | | | 3818 |
| VKVLGSGAF | LRKVKVLGSGAFGTV | 720 | | | | | | | | | | | | | | 3819 |
| LRELGSGLA | LRSLRELGSGLALIH | 455 | | | | | | | | | | | | | | 3820 |
| FQNLQVIRG | LSVFQNLQVIRGRIL | 422 | 0.1800 | 0.0280 | 0.0740 | 0.0010 | 0.0670 | | 0.0100 | | 0.0057 | 0.2900 | 0.0330 | | | 3821 |
| ILKGGVLIQ | LTEILKGGVLIQRNP | 145 | | | | | | | | | | | | | | 3822 |
| IDTNRSRAC | LTLIDTNRSRACHPC | 181 | | | | | | | | | | | | | | 3823 |
| HSAVVGIL | LTSHSAVVGILLVV | 651 | 0.1900 | | | | −0.0025 | | | | | 0.0049 | | | | 3824 |
| LPTNASLSF | LTYLPTNASLSFLQD | 62 | 0.4900 | 0.0100 | 0.0560 | 0.0150 | 0.3300 | | 0.0041 | | 0.0280 | 0.3200 | 0.0054 | | | 3825 |
| WDQDPPERG | LYYWDQDPPERGAPP | 1220 | | | | | | | | | | | | | | 3826 |
| VGSPYVSRL | MAGVGSPYVSRLLGI | 774 | | | | | | | | | | | | | | 3827 |
| LREVRAVTS | MEHLREVRAVTSANI | 347 | | | | | | | | | | | | | | 3828 |
| 0VKCWMIDSE | MIMVKCWMIDSECRP | 953 | | | | | | | | | | | | | | 3829 |
| LKETELRKV | MRILKETELRKVKVL | 712 | | | | | | | | | | | | | | 3830 |
| LEDVRLVHR | MSYLEDVRLV$$RDLA | 833 | | | | | | | | | | | | | | 3831 |
| LGPASPLDS | NEDLGPASPLDSTFY | 991 | | | | | | | | | | | | | | 3832 |
| VTCFGPEAD | NGSVTCFGPEADQCV | 571 | | | | | | | | | | | | | | 3833 |
| VKDVFAFGG | NGVVKDVFAFGGAVE | 1178 | | | | | | | | | | | | | | 3834 |
| LTYLPTNAS | NLELTYLPTNASLSF | 59 | 0.4700 | 0.0280 | 0.0090 | 0.0010 | 0.3800 | | 0.0050 | | 0.0017 | 0.0680 | 0.0220 | | | 3835 |
| VIRGRILHN | NLQVIRGRILHNGAY | 427 | | | | | | | | | | | | | | 3836 |
| YWDQDPPER | NLYYWDQDPPERGAP | 1219 | | | | | | | | | | | | | | 3837 |
| LALTLIDTN | NNQLALTLIDTNRSR | 176 | | | | | | | | | | | | | | 3838 |
| LCYQDTILW | NPQLCYQDTILWKDI | 158 | | | | | | | | | | | | | | 3839 |
| LCFVHTVPW | NTHLCFVHTVPWDQL | 471 | | | | | | | | | | | | | | 3840 |
| INCTHSCVD | PCPINCTHSCVDLDD | 625 | | | | | | | | | | | | | | 3841 |
| LPDLSVFQN | PDSLPDLSVFQNLQV | 416 | | | | | | | | | | | | | | 3842 |
| LQVFETLEE | PEQLQVFETLEEITG | 394 | | | | | | | | | | | | | | 3843 |
| FDGDPASNT | PESFDGDPASNTAPL | 378 | | | | −0.0027 | | | | | | | | | | 3844 |
| VNQPDVRPQ | PEYVNQPDVRPQPPS | 1137 | | | | | | | | | | | | | | 3845 |
| VARCPSGVK | PECVARCPSGVKPDL | 594 | | | | | | | | | | | | | | 3846 |
| LRELQLRSL | PGGLRELQLRSLTEI | 134 | | | | | | | | | | | | | | 3847 |
| WMALESILR | PIKWMALESILRRRF | 885 | 0.7900 | | | | 0.0350 | | | | | 0.0078 | | | | 3848 |
| VKPDLSYMP | PSGVKPDLSYMPIWK | 601 | | | | −0.0027 | | | | | | | | | | 3849 |
| FKGTPTAEN | PSTFKGTPTAENPEY | 1234 | −0.0005 | | | | −0.0032 | | | | | −0.0011 | | | | 3850 |
| YLSTDVGSC | PYNYLSTDVGSCTLV | 300 | | | | | | | | | | | | | | 3851 |
| ILWKDIFHK | QDTILWKDIFHKNNQ | 164 | | | | | | | | | | | | | | 3852 |
| VEECRVLOG | QECVEECRVLQGLPR | 538 | | | | | | | | | | | | | | 3853 |
| FCPDPAPGA | QGFFCPDPAPGAGGM | 1028 | −0.0005 | | | | 0.0230 | | | | | −0.0011 | | | | 3854 |
| LELTYLPTN | QGNLELTYLPTNASL | 57 | | | | | | | | | | | | | | 3855 |
| LTLIDTNRS | QLALTLIDTNRSRAC | 178 | | | | | | | | | | | | | | 3856 |
| YQDTILWKD | QLCYQDTILWKDIFH | 160 | | | | | | | | | | | | | | 3857 |
| VRPQPPSPR | QPDVRPQPPSPREGP | 1142 | 0.0007 | | | | −0.0032 | | | | | −0.0011 | | | | 3858 |
| ICTIDVYMI | QPPICTIDVYMIMVK | 943 | 0.0670 | 0.0540 | 0.0027 | 0.0976 | 0.0060 | | 0.0046 | | 0.0013 | 0.1000 | 0.0051 | | | 3859 |
| FFCPDPAPG | QQGFFCPDPAPGAGG | 1027 | | | | | | | | | | | | | | 3860 |
| IRKYTMRRL | QQKIRKYTMRRLLQE | 679 | | | | | | | | | | | | | | 3861 |
| VWSYGVTVW | QSDVWSYGVTVWELM | 902 | | | | | | | | | | | | | | 3862 |
| LQRLRIVRG | QVPLQRLRIVRGTQL | 93 | | | | | | | | | | | | | | 3863 |
| VNARHCLPC | REYVNARHCLPCHPE | 552 | | | | | | | | | | | | | | 3864 |
| ILHNGAYSL | RGRILHNGAYSLTLQ | 432 | | | | | | | | | | | | | | 3865 |
| LGSQDLLNW | RGRLGSQDLLNWCMQ | 814 | | | | | | | | | | | | | | 3866 |
| YQGCQVVQG | RHLYQGCQVVQGNLE | 47 | | | | | | | | | | | | | | 3867 |
| FRELVSEFS | RPRFRELVSEFSRMA | 966 | | | | | | | | | | | | | | 3868 |
| LQETELVEP | RRLLQETELVEPLTP | 688 | | | | | | | | | | | | | | 3869 |
| LEDDMGDL | RSLLEDDDMGDLVDA | 1006 | | | | 0.0080 | | | | | | | | | | 3870 |
| LLLALLPPG | RWGLLLALLPPGAAS | 8 | 12.0000 | 0.1300 | 0.0270 | 0.0010 | 0.2800 | | 0.0710 | | −0.0003 | −0.0013 | 0.1200 | | | 3871 |
| FGASCVTAC | RYTFGASCVTACPYN | 288 | | | | | | | | | | | | | | 3872 |
| VGILLVVVL | SAVVGILLVVVLGVV | 656 | | | | | | | | | | | | | | 3873 |
| WSYGVTVWE | SDVWSYGVTVWELMT | 903 | | | | | | | | | | | | | | 3874 |
| LQGLGISWL | SLTLQGLGISWLGLR | 442 | | | | | | | | | | | | | | 3875 |
| LLNWCMQIA | SQDLLNWCMQIAKGM | 819 | | | | | | | | | | | | | | 3876 |
| LRGQECVEE | SQFLRGQECVEECRV | 532 | | | | | | | | | | | | | | 3877 |
| LGICLTSIV | SRLLGICLTSTVQLV | 783 | 0.3500 | 0.0220 | −0.0007 | 0.0062 | 0.1200 | | 0.0140 | | 0.3400 | 0.5600 | 0.0009 | | | 3878 |
| VGSCTLVCP | STDVGSCTLVCPLHN | 305 | | | | | | | | | | | | | | 3879 |
| VTVWELMTF | SYGVTVWELMTFGAK | 907 | | | | | | | | | | | | | | 3880 |
| LQPEQLQVF | TAPLQPEQLQVFETL | 389 | | | | 0.0023 | | | | | | | | | | 3881 |
| YVAPLTCSP | TDGYVAPLTCSPQPE | 1124 | −0.0005 | | | | −0.0032 | | | | | −0.0011 | | | | 3882 |
| LKGGVLIQR | TEILKGGVLIQRNPQ | 146 | | | | | | | | | | | | | | 3883 |
| VEPLTPSGA | TELVEPLTPSGAMPN | 694 | | | | | | | | | | | | | | 3884 |
| VYMIMVKCW | TIDVYMIMVKCWMID | 948 | | | | | | | | | | | | | | 3885 |
| FEDNYALAV | TQLFEDNYALAVLDN | 105 | 0.0530 | | | | −0.0025 | | | | | 0.0160 | | | | 3886 |
| MPYGCLLDH | TQLMPYGCLLDHVRE | 798 | | | | | | | | | | | | | | 3887 |
| VCAGGCARC | TRTVCAGGCARCKGP | 216 | | | | | | | | | | | | | | 3888 |
| VTGASPGGL | TTPVTGASPGGLREL | 126 | | | | | | | | | | | | | | 3889 |
| LVTQLMPYG | TVQLVTQLMPYGCLL | 793 | 0.2300 | 0.7500 | 0.0009 | 0.0010 | 0.0460 | | −0.0005 | | 0.0031 | 0.0100 | 0.0069 | | | 3890 |
| LHNQEVTAE | VCPLHNQEVTAEDGT | 314 | −0.0004 | | | | −0.0025 | | | | | −0.0013 | | | | 3891 |
| LTPSGAMPN | VEPLTPSGAMPNQAQ | 697 | −0.0008 | | | | −0.0025 | | | | | −0.0011 | | | | 3892 |
| LLVVVLGVV | VGILLVVVLGVVFGI | 659 | | | | | | | | | | | | | | 3893 |
| VPWDQLFRN | VHTVPWDQLFRNPHQ | 477 | | | | 0.0220 | | | | | | | | | | 3894 |
| VVFGILIKR | VLGVVFGILIKRRQQ | 666 | 0.0700 | 0.0110 | 0.0620 | 0.0021 | 0.0029 | | 0.4700 | | 0.0150 | 0.0320 | 0.6400 | | | 3895 |
| VTQLMPYGC | VQLVTQLMPYGCLLD | 794 | | | | | | | | | | | | | | 3896 |
| VTSANIQEF | VRAVTSANIQEFAGC | 353 | | | | | | | | | | | | | | 3897 |
| VHRDLAARN | VRLVHRDLAARNVLV | 839 | 0.0340 | 0.0064 | 0.0033 | 0.3400 | 0.0150 | | 0.2700 | | 0.0430 | 0.0230 | 0.1000 | | | 3898 |
| VPLQRLRIV | VRQVPLQRLRIVRGT | 91 | | | | | | | | | | | | | | 3899 |
| LLGICLTST | VSRLLGICLTSTVQL | 782 | | | | | | | | | | | | | | 3900 |
| LMPYGCLLD | VTQLMPYGCLLDHVR | 797 | | | | | | | | | | | | | | 3901 |
| ILLVVVLGV | VVGILLVVVLGVVFG | 658 | −0.0004 | | | | −0.0025 | | | | | −0.0013 | | | | 3902 |
| LMTFGAKPY | VWELMTFGAKPYDGI | 912 | 0.0870 | 0.0990 | 0.1000 | 0.0010 | 0.0550 | | 0.0054 | | 0.0004 | 0.0370 | 0.0089 | | | 3903 |
| LLALLPPGA | WGLLLALLPPGAAST | 9 | 5.1000 | 0.2100 | 0.0110 | 0.0013 | 1.3000 | | 0.2500 | | −0.0003 | −0.0013 | 0.4500 | | | 3904 |
| IPARElPDL | VDGIPARElPDLLEK | 923 | | | | | | | | | | | | | | 3905 |
| MVKCWMIDS | YMIMVKCWMIDSECR | 952 | | | | | | | | | | | | | | 3906 |
| IAHNQVRQV | YVLIAHNQVRQVPLQ | 83 | | | | | | | | | | | | | | 3907 |

[0499] TABLE XXa
HER2/NEU DR 3a Motif Peptides with Binding Data

| Core | Exemplary | | | | | | | | | | | | | | | |
|---|---|---|---|---|---|---|---|---|---|---|---|---|---|---|---|---|
| Sequence | Sequence | Position | DR1 | DR2w2B1 | DR2w2B2 | DR3 | DR4w4 | DR4w15 | DR5w11 | DR5w12 | DR6w19 | DR7 | DR8w2 | DR9 | DRw53 | SEQ ID NO. |
| VLRENTSPK | AIKVLRENTSPKANK | 751 | | | | 0.0075 | | | | | | | | | | 3908 |
| LDIDETEYH | ARLLDIDETEYHADG | 867 | 0.0001 | −0.0006 | −0.0007 | 0.3100 | −0.0055 | | −0.0008 | | −0.0001 | −0.0017 | −0.0009 | | | 3909 |
| LGMEHLREV | CYGLGMEHLREVRAV | 342 | | | | 0.0083 | | | | | | | | | | 3910 |
| LGLEPSEEE | DLTLGLEPSEEEAPR | 1058 | | | | −0.0025 | | | | | | | | | | 3911 |
| YYWDQDPPE | DNLYYWDQDPPERGA | 1218 | | | | −0.0025 | | | | | | | | | | 3912 |
| LWKDIFHKN | DTILWKDIFHKNNQL | 165 | | | | −0.0027 | | | | | | | | | | 3913 |
| YHADGGKVP | ETEYHADGGKVPIKW | 874 | | | | −0.0027 | | | | | | | | | | 3914 |
| LVSEFSRMA | FRELVSEFSRMARDP | 969 | | | | 0.0710 | | | | | | | | | | 3915 |
| MARDPQRFV | FSRMARDPQRFVVIQ | 976 | | | | 0.1600 | | | | | | | | | | 3916 |
| IQNEDLGPA | FVVIQNEDLGPASPL | 986 | | | | −0.0025 | | | | | | | | | | 3917 |
| VDAEEYLVP | GDLVDAEEYLVPQQG | 1015 | | | | 0.0250 | | | | | | | | | | 3918 |
| LFEDNYALA | GTQLFEDNYALAVLD | 104 | | | | 0.2200 | | | | | | | | | | 3919 |
| MALESILRR | IKWMALESILRRRFT | 886 | 0.9500 | | | | 0.0400 | | | | | 0.0040 | | | | 3920 |
| FPDEEGACQ | IWKFPDEEGACQPCP | 613 | | | | −0.0027 | | | | | | | | | | 3921 |
| LPTDCCHEQ | KGPLPTDCCHEQCAA | 228 | | | | −0.0027 | | | | | | | | | | 3922 |
| VVKDVFAFG | KNGVVKDVFAFGGAV | 1177 | | | | −0.0025 | | | | | | | | | | 3923 |
| LPREYVNAR | LQGLPREYVNARHCL | 547 | | | | −0.0027 | | | | | | | | | | 3924 |
| YSEDPTVPL | LQRYSEDPTVPLPSE | 1109 | | | | 0.0270 | | | | | | | | | | 3925 |
| YNTDTFESM | LVTYNTDTFESMPNP | 271 | | | | −0.0027 | | | | | | | | | | 3926 |
| LLQETELVE | MRRLLQETELVEPLT | 687 | | | | −0.0027 | | | | | | | | | | 3927 |
| ILDEAYVMA | NKEILDEAYVMAGVG | 764 | | | | 0.0047 | | | | | | | | | | 3928 |
| VTAEDGTQR | NQEVTAEDGTQRCEK | 319 | | | | −0.0027 | | | | | | | | | | 3929 |
| FDGDPASNT | PESFDGDPASNTAPL | 378 | | | | −0.0027 | | | | | | | | | | 3930 |
| VKPDLSYMP | PSGVKPDLSYMPIWK | 601 | | | | −0.0027 | | | | | | | | | | 3931 |
| FCPDPAPGA | QGFFCPDPAPGAGGM | 1028 | −0.0005 | | | | 0.0230 | | | | | −0.0011 | | | | 3932 |
| ILKETELRK | QMRILKETELRKVKV | 711 | 0.0419 | 0.0150 | 0.5900 | 0.3200 | −0.0055 | | 0.0041 | | 0.0008 | 0.0130 | 0.0064 | | | 3933 |
| LEDDDMGDL | RSLLEDDDMGDLVDA | 1006 | | | | 0.0080 | | | | | | | | | | 3934 |
| FDGDLGMGA | SDVFDGDLGMGAAKG | 1083 | | | | −0.0025 | | | | | | | | | | 3935 |
| FLPESFDGD | SLAFLPESFDGDPAS | 373 | | | | −0.0027 | | | | | | | | | | 3936 |
| FLQDIQEVQ | SLSFLQDIQEVQGYV | 70 | | | | 0.0520 | | | | | | | | | | 3937 |
| LQPEQLQVF | TAPLQPEQLQVEETL | 389 | | | | 0.0023 | | | | | | | | | | 3938 |
| LPSETDGYV | TVPLPSETDGYVAPL | 1117 | | | | −0.0025 | | | | | | | | | | 3939 |
| VPWDQLFRN | VHTVPWDQLFRNPHQ | 477 | | | | 0.0220 | | | | | | | | | | 3940 |
| VHRDLAARN | VRLVHRDLAARNVLV | 839 | 0.0340 | 0.0064 | 0.0033 | 0.3400 | 0.0150 | | 0.2700 | | 0.0430 | 0.0230 | 0.1000 | | | 3941 |
| FGPEADQCV | VTCFGPEADQCVACA | 574 | | | | −0.0027 | | | | | | | | | | 3942 |
| LSTDVGSCT | YNYLSTDVGSCTLVC | 301 | | | | 0.0059 | | | | | | | | | | 3943 |
| LLEDDDMGD | YRSLLEDDDMGDLVD | 1005 | | | | 0.0630 | | | | | | | | | | 3944 |
| LIDTNRSRA | ALTLIDTNRSRACHP | 180 | | | | 0.0350 | | | | | | | | | | 3945 |
| IDSECRPRF | CWMIDSECRPRFREL | 958 | 0.0036 | −0.0006 | 0.0150 | 0.4500 | −0.0055 | | −0.0008 | | −0.0001 | −0.0014 | 0.0028 | | | 3946 |
| YLEDVRLVH | GMSYLEDVRLVHRDL | 832 | | | | 0.1800 | | | | | | | | | | 3947 |
| VDLDDKGCP | HSCVDLDDKGCPAEQ | 632 | | | | −0.0027 | | | | | | | | | | 3948 |
| IHHNTHLCF | LALIHHNTHLCFVHT | 465 | 0.0140 | 0.0990 | 0.0009 | 0.3100 | −0.0055 | | 0.0025 | | 0.7500 | 0.0200 | 0.0330 | | | 3949 |
| AAPQPHPPP | QGGAAPQPHPPPAFS | 1200 | | | | −0.0025 | | | | | | | | | | 3950 |
| ASPETHLDM | RLPASPETHLDMLRH | 34 | | | | −0.0027 | | | | | | | | | | 3951 |
| AHNQVRQVP | VLIAHNQVRQVPLQR | 84 | | | | 0.0290 | | | | | | | | | | 3952 |
| LFRNPHQAL | WDQLFRNPHQALLHT | 482 | −0.0001 | 0.0015 | −0.0007 | 0.9000 | −0.0055 | | −0.0008 | | 0.0410 | −0.0017 | −0.0009 | | | 3953 |

[0500] TABLE XXI
Population coverage with combined HLA Supertypes

| | PHENOTYPIC FREQUENCY | | | | | |
|---|---|---|---|---|---|---|
| | | North | | | | |
| | | American | | | | |
| HLA-SUPERTYPES | Caucasian | Black | Japanese | Chinese | Hispanic | Average |
| a. Individual Supertypes | | | | | | |
| A2 | 45.8 | 39.0 | 42.4 | 45.9 | 43.0 | 43.2 |
| A3 | 37.5 | 42.1 | 45.8 | 52.7 | 43.1 | 44.2 |
| B7 | 43.2 | 55.1 | 57.1 | 43.0 | 49.3 | 49.5 |
| A1 | 47.1 | 16.1 | 21.8 | 14.7 | 26.3 | 25.2 |
| A24 | 23.9 | 38.9 | 58.6 | 40.1 | 38.3 | 40.0 |
| B44 | 43.0 | 21.2 | 42.9 | 39.1 | 39.0 | 37.0 |
| B27 | 28.4 | 26.1 | 13.3 | 13.9 | 35.3 | 23.4 |
| B62 | 12.6 | 4.8 | 36.5 | 25.4 | 11.1 | 18.1 |
| B58 | 10.0 | 25.1 | 1.6 | 9.0 | 5.9 | 10.3 |
| b. Combined Supertypes | | | | | | |
| A2, A3, B7 | 84.3 | 86.8 | 89.5 | 89.8 | 86.8 | 87.4 |
| A2, A3, B7, A24, B44, A1 | 99.5 | 98.1 | 100.0 | 99.5 | 99.4 | 99.3 |
| A2, A3, B7, A24, B44, A1, | 99.9 | 99.6 | 100.0 | 99.8 | 99.9 | 99.8 |
| B27, B62, B58 | | | | | | |

[0501] TABLE XXII

| | | | | | | | | |
|---|---|---|---|---|---|---|---|---|
| | | | | | | | | No. A2 |
| | | | A*0201 | A*0202 | A*0203 | A*0206 | A*6802 | Alleles |
| Source | AA | Sequence | nM | nM | nM | nM | nM | Crossbound |

Crossbinding data of A2 supermotif peptides

| | | | | | | | | |
|---|---|---|---|---|---|---|---|---|
| Her2/neu.5 | 9 | ALCRWGLLL | 100 | — | 278 | — | — | 2 |
| Her2/neu.5 | 10 | ALCRWGLLLA | 139 | 1955 | 12 | 1947 | 2500 | 2 |
| Her2/neu.48 | 9 | HLYQGCQVV | 139 | 307 | 13 | 514 | 1143 | 3 |
| Her2/neu.106 | 9 | QLFEDNYAL | 17 | 226 | 11 | 463 | 2105 | 4 |
| Her2/neu.106 | 10 | QLFEDNYALA | 357 | 662 | 9.1 | 218 | 74 | 4 |
| Her2/neu.144 | 10 | SLTEILKGGV | 238 | — | 22 | — | — | 2 |
| Her2/neu.153 | 9 | VLIQRNPQL | 23 | 3909 | 3.3 | 1057 | — | 2 |
| Her2/neu.369 | 9 | KIFGSLAFL | 36 | 9.0 | 19 | 23 | 3333 | 4 |
| Her2/neu.435 | 9 | ILHNGAYSL | 75 | 358 | 100 | 569 | — | 3 |
| Her2/neu.466 | 9 | ALIHHNTHL | 278 | 1265 | 10 | 1762 | — | 2 |
| Her2/neu.508 | 9 | GLACHQLCA | 417 | — | 127 | — | 9091 | 2 |
| Her2/neu.653 | 9 | SIISAVVGI | 69 | 524 | 35 | 285 | 148 | 4 |
| Her2/neu.665 | 9 | VVLGVVFGI | 14 | — | 2500 | 430 | 2000 | 2 |
| Her2/neu.689 | 9 | RLLQETELV | 21 | — | 625 | 34 | — | 2 |
| Her2/neu.767 | 9 | ILDEAYVMA | 238 | — | 4167 | 3083 | — | 1 |
| Her2/neu.773 | 10 | VMAGVGSPYV | 200 | 391 | 13 | 3700 | — | 3 |
| Her2/neu.789 | 9 | CLTSTVQLV | 208 | 457 | 6.7 | 308 | 8000 | 4 |
| Her2/neu.799 | 9 | QLMPYGCLL | 217 | 977 | 114 | 712 | — | 2 |
| Her2/neu.952 | 10 | YMIMVKCWMI | 20 | 307 | 83 | 116 | 267 | 5 |
| Her2/neu.952 | 9 | YMIMVKCWM | 217 | — | 625 | 2643 | 1000 | 1 |

A2 supermotif analog peptides

| | | | | | | | | |
|---|---|---|---|---|---|---|---|---|
| Her2/neu.5 | 9 | ALCRWGLLL | 100 | — | 278 | — | — | 2 |
| Her2/neu.5.T2B3V9 | 9 | ATBRWGLLV | 16667 | 215 | 323 | 2177 | 1739 | 2 |
| Her2/neu.5V2B3V9 | 9 | AVBRWGLLV | 10000 | 215 | 141 | 2177 | 4706 | 2 |
| Her2/neu.5.B3 | 9 | ALBRWGLLL | 238 | 1 | 12 | 6167 | 7273 | 3 |
| Her2/neu.5B3V9 | 9 | ALBRWGLLV | 18 | 33 | 4.2 | 285 | — | 4 |
| Her2/neu.5M2B3V9 | 9 | AMBRWGLLV | 36 | 473 | 16 | 726 | — | 3 |
| Her2/neu.153 | 9 | VLIQRNPQL | 23 | 3909 | 3.3 | 1057 | — | 2 |
| Her2/neu.153V9 | 9 | VLIQRNPQV | 55 | 768 | 135 | 385 | — | 3 |
| Her2/neu.369 | 9 | KIFGSLAFL | 36 | 9.0 | 19 | 23 | 3333 | 4 |
| Her2/neu.369V2V9 | 9 | KVFGSLAFV | 20 | 19.0 | 769 | 15 | 29 | 4 |
| Her2/neu.369T2V9 | 9 | KTFGSLAFV | 35 | 13.0 | 1010 | 14 | 17 | 4 |
| Her2/neu.369L2V9 | 9 | KLFGSLAFV | 5.8 | 7.5 | 19 | 17 | 1270 | 4 |
| Her2/neu.653 | 9 | SIISAVVGI | 69 | 524 | 35 | 285 | 148 | 4 |
| Her2/neu.653.L2V9 | 9 | SLISAVVGV | 7.1 | 10 | 16 | 20 | 110 | 5 |
| Her2/neu.665 | 9 | VVLGVVFGI | 14 | — | 2500 | 430 | 2000 | 2 |
| Her2/neu.665V2V9 | 9 | VVLGVVFGV | | | | | | |
| Her2/neu.665L2V9 | 9 | VLLGVVFGV | 2.4 | 17 | 14 | 6.0 | 8000 | 4 |
| Her2/neu.952 | 10 | YMIMVKCWMI | 20 | 307 | 83 | 116 | 267 | 5 |
| Her2/neu.952L2V10 | 10 | YLIMVKCWMV | 13 | 56 | 116 | 18 | 84 | 5 |
| Her2/neu.952L2B7V10 | 10 | YLIMVKBWMV | 7.2 | 66 | 77 | 11 | 851 | 4 |

— indicates binding affinity = 10,000 nM.

[0502] TABLE XXIII
HLA-A3 Supermotif-bearing Peptides

| | | | | | | | | No. of A3 | | | | |
|---|---|---|---|---|---|---|---|---|---|---|---|---|
| | | | A* | A* | A* | A* | A* | Alleles | CTL | | Published | Published |
| | | | 0301 | 1101 | 3101 | 3301 | 6801 | Cross- | Wild- | CTL | CTL | CTL |
| AA | Sequence | Source | nM | nM | nM | nM | nM | bound | type | Tumor | Wildtype | Tumor |
| 10 | QLRSLTEILK | Her2/neu.141 | 55 | 462 | 667 | 6170 | — | 2 | | | | |
| 10 | ILKGGVLIQR | Her2/neu.148 | 275 | — | 25 | 121 | 205 | 4 | | | | |
| 10 | IVKGGVLIQR | Her2/neu.148.V2 | 275 | 7500 | 72 | 126 | 29 | 4 | | | | |
| 10 | IVKGGVLIQK | Her2/neu.148.V2K10 | 26 | 102 | 450 | 6591 | 27 | 4 | | | | |
| 10 | TILWKDIFHK | Her2/neu.166 | 256 | 1.7 | 487 | 690 | 200 | 4 | | | | |
| 10 | TVLWKDIFHR | Her2/neu.166.V2R10 | 8462 | 286 | 600 | 76 | 42 | 3 | | | | |
| 9 | ILWKDIFHK | Her2/neu.167 | 39 | 19 | 82 | 967 | 1739 | 3 | | | | |
| 9 | IVWKDIFHK | Her2/neu.167.V2 | 23 | 40 | 247 | 853 | 178 | 4 | | | | |
| 9 | IVWKDIFHR | Her2/neu.167.V2R9 | 143 | 286 | 6.0 | 16 | 15 | 5 | | | | |
| 10 | RTVCAGGCAR | Her2/neu.217 | 1618 | 462 | 40 | 1318 | 320 | 3 | | | | |
| 9 | TVCAGGCAR | Her2/neu.218 | — | 261 | 129 | 326 | 83 | 4 | | | | |
| 9 | TVBAGGBAR | Her2/neu.218.B3B7 | 314 | 111 | 247 | 242 | 8.0 | 5 | | | | |
| 9 | TVBAGGBAK | Her2/neu.218.B3B7K9 | 24 | 29 | — | — | 7.3 | 3 | | | | |
| 10 | IVWLGLRSLR | Her2/neu.450.V2 | 234 | 1936 | 11 | 193 | 7.3 | 4 | | | | |
| 10 | IVWLGLRSLK | Her2/neu.450.V2K10 | 3.9 | 128 | 273 | 2071 | 12 | 4 | | | | |
| 10 | ISWLGLRSLR | Her2/neu.450 | 268 | 2222 | 6.9 | 223 | 73 | 4 | | | | |
| 10 | HTVPWDQLFR | Her2/neu.478 | 3143 | 83 | 19 | 88 | 4.0 | 4 | | | | |
| 10 | HVVPWDQLFR | Her2/neu.478.V2 | 7333 | 1333 | 391 | 193 | 3.6 | 3 | | | | |
| 10 | HVVPWDQLFK | Her2/neu.478.V2K10 | 180 | 375 | — | — | 8.9 | 3 | | | | |
| 9 | CVNCSQFLR | Her2/neu.528 | 7333 | 194 | 34 | 50 | 18 | 4 | | | | |
| 9 | BVNBSQFLR | Her2/neu.528.B1B4 | 177 | 80 | 38 | 58 | 10 | 5 | | | | |
| 9 | BVNBSQFLK | Her2/neu.528.B1B4K9 | 34 | 22 | 60 | 4265 | 15 | 4 | | | | |
| 10 | GVVFGILIKR | Her2/neu.668 | 611 | 182 | 305 | 2071 | 19 | 3 | | | | |
| 9 | VVFGILIKR | Her2/neu.669 | 100 | 8.3 | 13 | 78 | 4.0 | 5 | 1/3 | 0/1 | | |
| 10 | VVFGILIKRR | Her2/neu.669 | 3667 | 375 | 290 | 193 | 15 | 4 | | | | |
| 9 | VVFGILIKK | Her2/neu.669.K9 | 22 | 19 | 3750 | — | 35 | 3 | | | | |
| 9 | KIRKYTMRR | Her2/neu.681 | 15 | — | 16 | 4028 | — | 2 | 3/3 | 2/3 | +¹⁾ | + |
| 9 | VLRENTSPK | Her2/neu.754 | 28 | 462 | 129 | 290 | — | 4 | 4/7 | 3/6 | +¹⁾ | + |
| 9 | VVRENTSPR | Her2/neu.754.V2R9 | 200 | 5455 | 375 | 126 | 178 | 4 | | | | |
| 9 | LLDHVRENR | Her2/neu.806 | 297 | — | 500 | 326 | 5714 | 3 | | | | |
| 9 | LVARNVLVK | Her2/neu.846.V2 | 42 | 214 | 9000 | — | 205 | 3 | | | | |
| 9 | LAARNVLVK | Her2/neu.846 | 190 | 211 | — | — | 500 | 3 | | | | |
| 9 | LVKSPNHVK | Her2/neu.852 | 23 | 86 | 182 | 784 | 73 | 4 | | | +¹⁾ | |
| 9 | LVKSPNHVR | Her2/neu.852.R9 | 7857 | — | 198 | 107 | 50 | 3 | | | | |
| 9 | KITDFGLAR | Her2/neu.860 | 65 | 25 | 100 | — | 1633 | 3 | | | | |
| 9 | KVTDFGLAR | Her2/neu.860.V2 | 201 | 76 | 106 | — | 133 | 4 | | | | |
| 9 | MVLESILRR | Her2/neu.889.V2 | 216 | 273 | 207 | 153 | 22 | 5 | | | | |
| 9 | MVLESILRK | Her2/neu.889.V2K9 | 61 | 16 | — | 2636 | 381 | 3 | | | | |
| 9 | MALESILRR | Her2/neu.889 | 3235 | 253 | 192 | 132 | 127 | 4 | | | | |
| 10 | LVSEFSRMAR | Her2/neu.972 | 1528 | 182 | 49 | 126 | 36 | 4 | | | | |
| 10 | LVSEFSRMAK | Her2/neu.972.K10 | 250 | 71 | 2250 | 5273 | 62 | 3 | | | | |
| 10 | AVPLDSTFYR | Her2/neu.997.V2 | −110000 | 88 | 30000 | 2636 | 73 | 2 | | | | |
| 10 | AVPLDSTFYK | Her2/neU.997.V2K10 | 550 | 33 | 1500 | 22308 | 229 | 2 | | | | |
| 10 | ASPLDSTFYR | Her2/neu.997 | — | 90 | 150 | 2071 | 154 | 3 | | | | |

¹⁾Kawashima et al., Cancer Research 59:431, 1999
— indicates binding affnity > 10,000 nM.

[0503] TABLE XXIV
B7 Supermotif Peptides

| | | | | | | | | No. of B7 |
|---|---|---|---|---|---|---|---|---|
| | | | | | | | | Alleles |
| AA | Sequence | Source | B*0702 nM | B*3501 nM | B*5101 nM | B*5301 nM | B*5401 nM | Crossbound |
| 9 | LPTNASLSF | Her2/neu.65 | 212 | 114 | 809 | 34 | — | 3 |
| 10 | LPTNASLSFL | Her2/neu.65 | 290 | — | 2500 | — | — | 1 |
| 9 | FPTNASLSF | Her2/neu.65.F1 | 1.1 | 7.9 | 85 | 6.2 | 556 | 4 |
| 9 | FPTNASLSI | Her2/neu.65.F1I9 | 4.6 | 300 | 8.7 | 14 | 2.8 | 5 |
| 10 | FPTNASLSFI | Her2/neu.65.F1I10 | 120 | 424 | 23 | 85 | 53 | 5 |
| 10 | FPTNASLSFL | Her2/neu.65.F1 | 18 | 200 | 262 | 172 | 119 | 5 |
| 9 | FPLNNTTPI | Her2/neu.121.F1I9 | 1.6 | 200 | 13 | 52 | 1.6 | 5 |
| 9 | FPLNNTTPV | Her2/neu.121.F1 | 0.20 | 40 | 7.1 | 1069 | 1.1 | 4 |
| 10 | SPGGLRELQL | Her2/neu.133 | 95 | — | — | — | — | 1 |
| 8 | SPGGLREL | Her2/neu.133 | 100 | — | — | — | — | 1 |
| 10 | FPGGLRELQI | Her2/neu.133.F1I10 | 306 | — | 1774 | 310 | 476 | 3 |
| 10 | FPMCKGSRCI | Her2/neu.196.F1 | 183 | — | 500 | 6643 | 303 | 3 |
| 10 | MPNPEGRYTI | Her2/neu.282.I10 | 34 | 111 | 13 | 9.3 | 46 | 5 |
| 10 | FPNPEGRYTI | Her2/neu.282.F1 | 324 | 24 | 9.3 | 6.6 | 3.2 | 5 |
| 10 | CPLHNQEVTI | Her2/neu.315.I10 | 458 | — | 42 | 274 | 556 | 3 |
| 10 | KPCARVCYGL | Her2/neu.336 | 149 | — | — | — | — | 1 |
| 10 | FPCARVCYGL | Her2/neu.336.F1 | 190 | 450 | 1000 | 1691 | 36 | 3 |
| 8 | WPDSLPDI | Her2/neu.415.I8 | 71 | — | 5000 | — | — | 1 |
| 10 | FPHQALLHTA | Her2/neu.488.F1 | 393 | 379 | 4231 | — | 1.3 | 3 |
| 10 | FPHQALLHTI | Her2/neu.488.F1I10 | 86 | 655 | 19 | 42 | 4.0 | 4 |
| 11 | CPSGVKPDLSY | Her2/neu.600 | 183 | 3600 | — | — | — | 1 |
| 11 | CPSGVKPDLSI | Her2/neu.600.I11 | 290 | — | 138 | 344 | 625 | 3 |
| 9 | FPSGVKPDI | Her2/neu.600.F1I9 | 6.3 | 9000 | 204 | 930 | 44 | 3 |
| 11 | FPSGVKPDLSI | Her2/neu.600.F1I11 | 196 | 3273 | 153 | 211 | 208 | 4 |
| 9 | KPDLSYMPI | Her2/neu.605 | 76 | — | 2500 | — | — | 1 |
| 9 | FPDLSYMPI | Her2/neu.605.F1 | 22 | 167 | 10 | 72 | 31 | 5 |
| 10 | CPAEQRASPL | Her2/neu.642 | 37 | — | — | — | — | 1 |
| 10 | FPAEQRASPI | Her2/neu.642.F1I10 | 3.1 | — | 98 | 4895 | 56 | 3 |
| 10 | FPAEQRASPL | Her2/neu.642.F1 | 1.4 | 248 | 859 | 8455 | 286 | 3 |
| 10 | SPLTSIISAV | Her2/neu.649 | 61 | — | — | — | 667 | 1 |
| 9 | SPLTSIISI | Her2/neu.649.I9 | 86 | — | 275 | 3444 | 217 | 3 |
| 9 | FPLTSIISA | Her2/neu.649.F1 | 290 | 21 | 663 | 3000 | 1.4 | 3 |
| 9 | FPLTSIISI | Her2/neu.649.F1I9 | 212 | 118 | 13 | 28 | 1.5 | 5 |
| 10 | FPLTSIISAI | Her2/neu.649.F1I10 | 229 | 327 | 26 | 194 | 3.3 | 5 |
| 10 | FPLTSIISAV | Her2/neu.649.F1 | 220 | 300 | 63 | 2906 | 1.2 | 4 |
| 11 | FPLTSIISAVI | Her2/neu.649.F1I11 | 367 | 96 | 4.6 | 66 | 2.2 | 5 |
| 9 | FPLTPSGAI | Her2/neu.698.F1I9 | 0.90 | 2057 | 9.2 | 1632 | 1.9 | 3 |
| 9 | FPLTPSGAM | Her2/neu.698.F1 | 2.0 | 16 | 71 | 1525 | 91 | 4 |
| 10 | FPSGAMPNQI | Her2/neu.701.F1 | 229 | 6546 | 131 | 775 | 100 | 3 |
| 11 | MPNQAQMRILI | Her2/neu.706.I11 | 344 | 1800 | 37 | 12 | 303 | 4 |
| 9 | FPNQAQMRI | Her2/neu.706.F1 | 68 | 108 | 12 | 18 | 4.5 | 5 |
| 10 | FPNQAQMRII | Her2/neu.706.F1I10 | 290 | 514 | 76 | 490 | 59 | 4 |
| 10 | FPNQAQMRIL | Her2/neu.706.F1 | 81 | 200 | 458 | 443 | 31 | 5 |
| 8 | FPKANKEI | Her2/neu.760.F1 | 0.16 | — | 2500 | — | 3125 | 1 |
| 9 | FPKANKEII | Her2/neu.760.F1I9 | 8.5 | — | 55 | 7154 | 39 | 3 |
| 9 | FPKANKEIL | Her2/neu.760.F1 | 6.7 | 4500 | 190 | — | 77 | 3 |
| 8 | FPYVSRLL | Her2/neu.779.F1 | 61 | 600 | 6.9 | 581 | 172 | 3 |
| 10 | FPYVSRLLGI | Her2/neu.779.F1 | 112 | 3600 | 7.9 | 358 | 9.1 | 4 |
| 11 | MPYGCLLDHVI | Her2/neu.801.I11 | 66 | 4.2 | 2.4 | 1.9 | 7.7 | 5 |
| 8 | FPIKWMAI | Her2/neu.884.F1I8 | 22 | 1143 | 122 | 930 | 33 | 3 |
| 8 | FPIKWMAL | Her2/neu.884.F1 | 0.60 | 248 | 306 | 547 | 40 | 4 |
| 8 | KPYDGIPA | Her2/neu.921 | 367 | — | — | 490 | 29 | 3 |
| 8 | KPYDGIPI | Her2/neu.921.I8 | 115 | — | 74 | 5167 | 303 | 3 |
| 8 | FPYDGIPA | Her2/neu.921.F1 | 423 | 206 | 157 | 6200 | 1.0 | 4 |
| 8 | FPYDGIPI | Her2/neu.921.F1I8 | 177 | 379 | 10 | 344 | 56 | 5 |
| 11 | FPYDGIPAREI | Her2/neu.921.F1I11 | 141 | 2880 | 50 | 465 | 15 | 4 |
| 9 | LPQPPICTI | Her2/neu.941 | 196 | — | 4.2 | 28 | 19 | 4 |
| 9 | FPQPPICTI | Her2/neu.941.F1 | 20 | 360 | 17 | 11 | 1.7 | 5 |
| 11 | FPRFRELVSEI | Her2/neu.966.F1I11 | 229 | 240 | 167 | 127 | 28 | 5 |
| 10 | FPASPLDSTF | Her2/neu.995.F1 | 3.7 | 10 | 579 | 10 | 200 | 4 |
| 10 | FPASPLDSTI | Her2/neu.995.F1I10 | 20 | 514 | 20 | 30 | 14 | 5 |
| 11 | FPLDSTFYRSI | Her2/neu.998.F1I11 | 229 | 2667 | 46 | 620 | 2.4 | 3 |
| 11 | FPLDSTFYRSL | Her2/neu.998.F1 | 42 | 400 | 324 | 1192 | 2.7 | 4 |
| 9 | FPLAPSEGI | Her2/neu.1073.F1I9 | 100 | 554 | 204 | 239 | 5.9 | 4 |
| 9 | FPTHDPSPI | Her2/neu.1101.F1I9 | 108 | 600 | 56 | 274 | 50 | 4 |
| 9 | FPTHDPSPL | Her2/neu.1101.F1 | 10 | 72 | 3438 | 1632 | 208 | 3 |
| 9 | FPSETDGYI | Her2/neu.1120.F1I9 | 220 | 655 | 31 | 37 | 156 | 4 |
| 9 | FPSETDGYV | Her2/neu.1120.F1 | 204 | 809 | 32 | 517 | 26 | 3 |
| 11 | PPSPREGPLPI | Her2/neu.1149.I11 | 22 | — | 423 | 85 | — | 3 |
| 11 | FPSPREGPLPI | Her2/neu.1149.F1I11 | 190 | — | 262 | 5167 | 263 | 3 |
| 9 | FPREGPLPI | Her2/neu.1151.F1I9 | 0.30 | — | 14 | 2818 | 4.0 | 3 |
| 10 | FPREGPLPAI | Her2/neu.1151.F1I10 | 20 | 7200 | 20 | 620 | 3.4 | 3 |
| 9 | FPLPAARPA | Her2/neu.1155.F1 | 34 | 277 | 1897 | — | 1.5 | 3 |
| 9 | FPLPAARPI | Her2/neu.1155.F1I9 | 6.5 | 600 | 7.1 | 282 | 3.8 | 4 |
| 9 | FPAARPAGI | Her2/neu.1157.F1I9 | 9.3 | — | 131 | 4227 | 48 | 3 |
| 11 | FPAARPAGATI | Her2/neu.1157.F1I11 | 39 | 4235 | 13 | 332 | 50 | 4 |
| 11 | FPAARPAGATL | Her2/neu.1157.F1 | 3.9 | 360 | 239 | 2906 | 133 | 4 |
| 8 | FPGKNGVI | Her2/neu.1174.F1I8 | 458 | — | 177 | — | 385 | 3 |

[0504] TABLE XXV
HLA-A1 Motif-Bearing Peptides

| AA | Sequence | Source | A*0101 nM |
|---|---|---|---|
| 11 | GTDMKLRLPY | Her2/neu.28.Y10 | 50 |
| 11 | ETHLDMLRHLY | Her2/neu.40 | 89 |
| 9 | HLDMLRHLY | Her2/neu.42 | 2.7 |
| 9 | HTDMLRHLY | Her2/neu.42.T2 | 1.9 |
| 9 | GTQLFEDNY | Her2/neu.104 | 139 |
| 9 | GTDLFEDNY | Her2/neu.104.D3 | 0.90 |
| 10 | PTDCCHEQCA | Her2/neu.232 | 125 |
| 10 | PTDCCHEQCY | Her2/neu.232.Y10 | 46 |
| 11 | PTDCCHEQCAA | Her2/neu.232 | 58 |
| 11 | PTDCCHEQCAY | Her2/neu.232.Y11 | 18 |
| 10 | ESMPNPEGRY | Her2/neu.280 | 139 |
| 10 | ETMPNPEGRY | Her2/neu.280.T2 | 3.9 |
| 9 | ASCVTACPY | Her2/neu.293 | 455 |
| 11 | ASCVTACPYNY | Her2/neu.293 | 132 |
| 9 | ATCVTACPY | Her2/neu.293.T2 | 49 |
| 8 | VTACPYNY | Her2/neu.296 | 250 |
| 11 | VFETLEEITGY | Her2/neu.399 | 5556 |
| 11 | ETLEEITGYLY | Her2/neu.401 | 57 |
| 9 | ETDEEITGY | Her2/neu.401.D3 | 17 |
| 10 | TLEEITGYLY | Her2/neu.402 | 23 |
| 10 | TLDEITGYLY | Her2/neu.402.D3 | 3.4 |
| 11 | EADQCVACAHY | Her2/neu.580 | 250 |
| 9 | VMDGVGSPY | Her2/neu.773.D3 | 40 |
| 10 | CMQIAKGMSY | Her2/neu.826 | 83 |
| 10 | CTQIAKGMSY | Her2/neu.826.T2 | 19 |
| 9 | LLDIDETEY | Her2/neu.869 | 3.3 |
| 9 | LTDIDETEY | Her2/neu.869.T2 | 5.7 |
| 10 | FTHQSDVWSY | Her2/neu.899 | 9.3 |
| 10 | FTDQSDVWSY | Her2/neu.899.D3 | 0.60 |
| 10 | PADPLDSTFY | Her2/neu.996.D3 | 19 |
| 9 | ATPLDSTFY | Her2/neu.997.T2 | 36 |
| 10 | MTDLVDAEEY | Her2/neu.1014.T2 | 2.3 |
| 9 | LTCSPQPEY | Her2/neu.1131 | 192 |
| 9 | LTDSPQPEY | Her2/neu.1131.D3 | 32 |
| 10 | FSPAFDNLYY | Her2/neu.1213 | 4.5 |
| 10 | FTPAFDNLYY | Her2/neu.1213.T2 | 0.80 |
| 9 | SPDFDNLYY | Her2/neu 1214.D3 | 73.50 |
| 10 | GTPTAENPEY | Her2/neu.1239 | 397 |
| 10 | GTDTAENPEY | Her2/neu.1239.D3 | 26 |

[0505] TABLE XXVI
HLA-A24 Motif-Bearing Peptides

| AA | Sequence | Source | A*2402 nM |
|---|---|---|---|
| 8 | RWGLLLAL | Her2/neu.8 | 480 |
| 9 | RWGLLLALL | Her2/neu.8 | 9.2 |
| 9 | RYGLLALF | Her2/neu8.Y2F9 | 1.3 |
| 9 | TYLPTNASL | Her2/neu.63 | 316 |
| 11 | TYLPTNASLSF | Her2/neu.63 | 1.3 |
| 9 | TYLPTNASF | Her2/neu.63.F9 | 44 |
| 9 | CYGLGMEHF | Her2/neu.342.F9 | 164 |
| 10 | LYISAWPDSL | Her2/neu.410 | 143 |
| 10 | LYISAWPDSF | Her2/neu.410.F10 | 10 |
| 9 | AYPDSLPDF | Herw/neu414.Y2F9 | 24 |
| 9 | AYSLTLQGL | Her2/neu.440 | 92 |
| 9 | AYSLTLQGF | Her2/neu.440.F9 | 52 |
| 9 | EYVNARHCF | Her2/neu.553.F9 | 150 |
| 8 | SYMPIWKF | Her2/neu.609 | 38 |
| 9 | PYVSRLLGI | Her2/neu 780 | 71 |
| 11 | PYVSRLLGICL | Her2/neu.780 | 375 |
| 9 | PYVSRLLGF | Her2/neu.780.F9 | 9.2 |
| 10 | GYSYLEDVRF | Her2/neu.832.Y2F10 | 235.0 |
| 9 | KYMALESIF | Her2/neu.887.Y2F9 | 19.0 |
| 9 | RYTHQSDVF | Her2/neu.898.Y2F9 | 60.0 |
| 9 | VWSYGVTVW | Her2/neu.905 | 150 |
| 9 | VYSYGVTVF | Her2/neu.905.Y2F9 | 16 |
| 11 | VWSYGVTVWEL | Her2/neu.905 | 130 |
| 9 | SYGVTVWEL | Her2/neu.907 | 100 |
| 9 | SYGVTVWEF | Her2/neu.907.F9 | 26 |
| 9 | VYMIMVKCW | Her2/neu.951 | 75 |
| 11 | VYMIMVKCWMI | Her2/neu.951 | 6.7 |
| 9 | VYMIMVKCF | Her2/neu.951.F9 | 19 |
| 9 | RYRELVSEF | Her2/neu.968.Y2 | 36 |
| 9 | RYARDPQRF | Her2/neu.978.Y2 | 120 |

[0506] TABLE XXVII
HLA-A2 Supermotif-bearing Peptides

| | | | | | A* | A* | A* | No. of A2 | | | | |
|---|---|---|---|---|---|---|---|---|---|---|---|---|
| | | | A*0201 | A*0202 | 0203 | 0206 | 6802 | Alleles | CTL | CTL | CTL | CTL |
| AA | Sequence | Source | nM | nM | nM | nM | nM | Crossbound | Wildtype¹ | Tumor¹ | Wildtype² | Tumor² |
| 9 | ALCRWGLLL | Her2/neu.5 | 100 | — | 278 | — | — | 2 | 2/2 | 2/2 | | |
| 9 | ALBRWGLLV | Her2/neu.5.B3V9 | 18 | 33 | 4.2 | 285 | — | 4 | | | | |
| 9 | HLYQGCQVV | Her2/neu.48 | 139 | 307 | 13 | 514 | 1143 | 3 | 1/2 | 0/2 | 2/2 | 1/2 |
| 9 | VLIQRNPQL | Her2/neu.153 | 23 | 3909 | 3.3 | 1057 | — | 2 | | | | |
| 9 | VLIQRNPQV | Her2/neu.153.V9 | 55 | 768 | 135 | 385 | — | 3 | | | | |
| 9 | KIFGSLAFL | Her2/neu.369 | 36 | 9.0 | 19 | 23 | 3333 | 4 | 6/7 | 4/7 | | |
| 9 | KLFGSLAFV | Her2/neu.369.L2V9 | 5.8 | 7.5 | 19 | 17 | 1270 | 4 | | | | |
| 9 | KVFGSLAFV | Her2/neu.369.V2V9 | 20 | 19 | 769 | 15 | 29 | 4 | | | | |
| 9 | KTFGSLAFV | Her2/neu.369.T2V9 | 35 | 13 | 1010 | 14 | 17 | 4 | | | | |
| 10 | RILHNGAYSL | Her2/neu 434 | 278 | 1000 | 6667 | 1276 | — | 1 | | | | |
| 9 | ILHNGAYSL | Her2/neu.435 | 75 | 358 | 100 | 569 | — | 3 | 3/3 | 1/3 | 2/2 | 2/2 |
| 9 | SLISAVVGV | Her2/neu.653.L2V9 | 7.1 | 10 | 16 | 20 | 110 | 5 | | | | |
| 9 | VVLGVVFGI | Her2/neu.665 | 14 | — | 2500 | 430 | 2000 | 2 | | | | |
| 9 | VLLGVVFGV | Her2/neu.665.L2V9 | 2.4 | 19 | 14 | 6.0 | 8000 | 4 | | | | |
| 9 | RLLQETELV | Her2/neu.689 | 21 | — | 625 | 34 | — | 2 | | | | |
| 10 | VMAGVGSPYV | Her2/neu.773 | 200 | 391 | 13 | 3700 | — | 3 | 1/2 | 0/2 | 1/2 | 1/2 |
| 9 | CLTSTVQLV | Her2/neu.789 | 208 | 457 | 6.7 | 308 | 8000 | 4 | 1/4 | 0/4 | 1/2 | |
| 10 | YMIMVKCWMI | Her2/neu.952 | 20 | 307 | 83 | 116 | 267 | 5 | 0/1 | 0/1 | 2/2 | 2/2 |
| 10 | YLIMVKCWMV | Her2/neu.952.L2V10 | 13 | 56 | 116 | 18 | 84 | 5 | | | | |

¹Number of donors yielding a positive response/total tested.
²Data from ovarian cancer patients.

[0507] TABLE XXVIII
Her2/neu DR supertype primary binding

| DR147 | | | | | | DR147 |
|---|---|---|---|---|---|---|
| Algo | | | DR1 | DR4w4 | DR7 | Cross- |
| Sum | Sequence | Source | nM | nM | nM | binding |
| 2 | LCRWGLLLALLPPGA | Her2/neu.6 | 53 | — | — | 1 |
| 2 | RWGLLLALLPPGAAS | Her2/neu.8 | 0.42 | 161 | — | 2 |
| 2 | WGLLLALLPPGAAST | Her2/neu.9 | 0.98 | 35 | — | 2 |
| 2 | GTDMKLRLPASPETH | Her2/neu.28 | 5000 | — | — | 0 |
| 2 | DMKLRLPASPETHLD | Her2/neu.30 | 5000 | — | — | 0 |
| 2 | NLELTYLPTNASLSF | Her2/neu.59 | 11 | 118 | 368 | 3 |
| 3 | LTYLPTNASLSFLQD | Her2/neu.62 | 10 | 136 | 78 | 3 |
| 2 | TQLFEDNYALAVLDN | Her2/neu.105 | 94 | — | 1563 | 1 |
| 2 | VCPLHNQEVTAEDGT | Her2/neu.314 | — | — | — | 0 |
| 2 | CKKIFGSLAFLPESF | Her2/neu.367 | 21 | — | 926 | 2 |
| 2 | LSVFQNLQVIRGRIL | Her2/neu.422 | 28 | 672 | 86 | 3 |
| 2 | LRELGSGLALIHHNT | Her2/neu.458 | 161 | — | — | 1 |
| 3 | KPDLSYMPIWKFPDE | Her2/neu.605 | 152 | — | 8621 | 1 |
| 3 | ASPLTSIISAVVGIL | Her2/neu.648 | 56 | — | 714 | 2 |
| 2 | LTSIISAVVGILLVV | Her2/neu.651 | 26 | — | 5102 | 1 |
| 3 | VVGILLVVVLGVVFG | Her2/neu.658 | — | — | — | 0 |
| 3 | LLVVVLGVVFGILIK | Her2/neu.662 | >6250 | — | — | 0 |
| 2 | VLGVVFGILIKRRQQ | Her2/neu.666 | 71 | — | 781 | 2 |
| 2 | ETELVEPLTPSGAMP | Her2/neu.693 | 833 | — | — | 1 |
| 2 | VEPLTPSGAMPNQAQ | Her2/neu.697 | >6250 | — | — | 0 |
| 2 | ETELRKVKVLGSGAF | Her2/neu.717 | 313 | 1286 | 658 | 2 |
| 2 | GENVKIPVAIKVLRE | Her2/neu.743 | 79 | — | 807 | 2 |
| 2 | IKVLRENTSPKANKE | Her2/neu.752 | — | — | — | 0 |
| 3 | KEILDEAYVMAGVGS | Her2/neu.765 | — | 6164 | — | 0 |
| 3 | DEAYVMAGVGSPYVS | Her2/neu.769 | 100 | 196 | 125 | 3 |
| 2 | SRLLGICLTSTVQLV | Her2/neu.783 | 14 | 375 | 45 | 3 |
| 2 | TVQLVTQLMPYGCLL | Her2/neu.793 | 22 | 978 | 2500 | 2 |
| 3 | LLNWCMQIAKGMSYL | Her2/neu.822 | 6.0 | — | 208 | 2 |
| 2 | ITDFGLARLLDIDET | Her2/neu.861 | 1042 | — | — | 0 |
| 3 | KVPIKWMALESILRR | Her2/neu.883 | 2.3 | 652 | 1316 | 2 |
| 3 | PIKWMALESILRRRF | Her2/neu.885 | 6.3 | 1286 | 3205 | 1 |
| 2 | IKWMALESILRRRFT | Her2/neu.886 | 5.3 | 1125 | 6250 | 1 |
| 2 | GVTVWELMTFGAKPY | Her2/neu.909 | 3.6 | 1364 | 1471 | 1 |
| 3 | VWELMTFGAKPYDGI | Her2/neu.912 | 58 | 818 | 676 | 3 |
| 2 | GERLPQPPICTIDVY | Her2/neu.938 | — | — | — | 0 |
| 2 | QPPICTIDVYMIMVK | Her2/neu.943 | 75 | 7500 | 250 | 2 |
| 2 | DVYMIMVKCWMIDSE | Her2/neu.950 | 179 | 790 | 192 | 3 |
| 2 | QGFFCPDPAPGAGGM | Her2/neu.1028 | — | 1957 | — | 0 |
| 3 | TDGYVAPLTCSPQPE | Her2/neu.1124 | — | — | — | 0 |
| 2 | QPDVRPQPPSPREGP | Her2/neu.1142 | 7143 | — | — | 0 |
| 2 | PSTFKGTPTAENPEY | Her2/neu.1234 | — | — | — | 0 |

[0508] TABLE XXIX
DR supertype crossbinding

| | | | | | | | | | | | Broad |
|---|---|---|---|---|---|---|---|---|---|---|---|
| | | | DR4w4 | DR7 | DR2w2β1 | DR2w2β2 | DR6w19 | DR5w11 | DR8w2 | DR147 | Binding |
| Sequence | Source | DR1 nM | nM | nM | nM | nM | nM | nM | nM | Binding | (5/8) |
| RWGLLLALLPPGAAS | Her2/neu.8 | 0.40 | 161 | — | 70 | 741 | — | 282 | 408 | 2 | 6 |
| WGLLLALLPPGAAST | Her2/neu.9 | 1.0 | 35 | — | 43 | 1818 | — | 80 | 109 | 2 | 5 |
| NLELTYLPTNASLSF | Her2/neu.59 | 11 | 118 | 368 | 325 | 2222 | 2059 | 4000 | 2227 | 3 | 4 |
| LTYLPTNASLSFLQD | Her2/neu.62 | 10 | 136 | 78 | 910 | 357 | 125 | 4878 | 9074 | 3 | 6 |
| CKKIFGSLAFLPESF | Her2/neu.367 | 21 | — | 926 | 1300 | — | 1029 | — | — | 2 | 2 |
| LSVFQNLQVIRGRIL | Her2/neu.422 | 28 | 672 | 86 | 325 | 270 | 614 | 2000 | 1485 | 3 | 6 |
| ASPLTSIISAVVGIL | Her2/neu.648 | 56 | — | 714 | 96 | 5405 | 73 | — | — | 2 | 4 |
| VLGVVFGILIKRRQQ | Her2/neu.666 | 71 | — | 781 | 827 | 323 | 233 | 43 | 77 | 2 | 7 |
| ETELRKVKVLGSGAF | Her2/neu.717 | 313 | 1286 | 658 | 4790 | 3846 | 2500 | 3279 | 1960 | 2 | 2 |
| GENVKIPVAIKVLRE | Her2/neu.743 | 79 | — | 807 | 1936 | 5882 | 8750 | — | — | 2 | 2 |
| DEAYVMAGVGSPYVS | Her2/neu.769 | 100 | 196 | 125 | 3138 | 833 | 1750 | 7407 | 860 | 3 | 5 |
| SRLLGICLTSTVQLV | Her2/neu.783 | 14 | 375 | 45 | 414 | — | 10 | 1429 | — | 3 | 5 |
| TVQLVTQLMPYGCLL | Her2/neu.793 | 22 | 978 | 2500 | 12 | — | 1129 | — | 7101 | 2 | 3 |
| LLNWCMQIAKGMSYL | Her2/neu.822 | 6.0 | — | 208 | 1597 | 17 | 90 | 50 | 120 | 2 | 6 |
| KVPIKWMALESILRR | Her2/neu.883 | 2.3 | 652 | 1316 | 3.4 | 9.5 | 1129 | 2740 | 6203 | 2 | 4 |
| VWELMTFGAKPYDGI | Her2/neu.912 | 58 | 818 | 676 | 92 | 200 | 8750 | 3704 | 5506 | 3 | 5 |
| QPPICTIDVYMIMVK | Her2/neu.943 | 75 | 7500 | 250 | 169 | 7407 | 2692 | 4348 | 9608 | 2 | 3 |
| DVYMIMVKCWMIDSE | Her2/neu.950 | 179 | 790 | 192 | 1936 | 4762 | — | 909 | 1089 | 3 | 4 |

[0509] TABLE XXX
DR3 binding

| Sequence | Source | DR3 nM |
|---|---|---|
| RLPASPETHLDMLRH | Her2/neu.34 | — |
| SLSFLQDIQEVQGYV | Her2/neu.70 | 5769 |
| VLIAHNQVRQVPLQR | Her2/neu.84 | — |
| GTQLFEDNYALAVLD | Her2/neu.104 | 1364 |
| DTILWKDIFHKNNQL | Her2/neu.165 | — |
| ALTLIDTNRSRACHP | Her2/neu.180 | 8571 |
| KGPLPTDCCHEQCAA | Her2/neu.228 | — |
| LVTYNTDTFESMPNP | Her2/neu.271 | — |
| YNYLSTDVGSCTLVC | Her2/neu.301 | — |
| NQEVTAEDGTQRCEK | Her2/neu.319 | — |
| CYGLGMEHLREVRAV | Her2/neu.342 | — |
| SLAFLPESFDGDPAS | Her2/neu.373 | — |
| PESFDGDPASNTAPL | Her2/neu.378 | — |
| TAPLQPEQLQVFETL | Her2/neu.389 | — |
| LALIHHNTHLCFVHT | Her2/neu.465 | 968 |
| VHTVPWDQLFRNPHQ | Her2/neu.477 | — |
| WDQLFRNPHQALLHT | Her2/neu.482 | 333 |
| LQGLPREYVNARHCL | Her2/neu.547 | — |
| VTCFGPEADQCVACA | Her2/neu.574 | — |
| PSGVKPDLSYMPIWK | Her2/neu.601 | — |
| IWKFPDEEGACQPCP | Her2/neu.613 | — |
| HSCVDLDDKGCPAEQ | Her2/neu.632 | — |
| MRRLLQETELVEPLT | Her2/neu.687 | — |
| QMRILKETELRKVKV | Her2/neu.711 | 938 |
| AIKVLRENTSPKANK | Her2/neu.751 | — |
| NKEILDEAYVMAGVG | Her2/neu.764 | — |
| GMSYLEDVRLVHRDL | Her2/neu.832 | 1667 |
| VRLVHRDLAARNVLV | Her2/neu.839 | 882 |
| ARLLDIDETEYHADG | Her2/neu.867 | 968 |
| ETEYHADGGKVPIKW | Her2/neu.874 | — |
| IKWMALESILRRRFT | Her2/neu.886 | 682 |
| CWMIDSECRPRFREL | Her2/neu.958 | 667 |
| FRELVSEFSRMARDP | Her2/neu.969 | 4225 |
| FSRMARDPQRFVVIQ | Her2/neu.976 | 1875 |
| FVVIQNEDLGPASPL | Her2/neu.986 | — |
| YRSLLEDDDMGDLVD | Her2/neu.1005 | 4762 |
| RSLLEDDDMGDLVDA | Her2/neu.1006 | — |
| GDLVDAEEYLVPQQG | Her2/neu.1015 | — |
| QGFFCPDPAPGAGGM | Her2/neu.1028 | — |
| DLTLGLEPSEEEAPR | Her2/neu.1058 | — |
| SDVFDGDLGMGAAKG | Her2/neu.1083 | — |
| LQRYSEDPTVPLPSE | Her2/neu.1109 | — |
| TVPLPSETDGYVAPL | Her2/neu.1117 | — |
| KNGVVKDVFAFGGAV | Her2/neu.1177 | — |
| QGGAAPQPHPPPAFS | Her2/neu.1200 | — |
| DNLYYWDQDPPERGA | Her2/neu.1218 | — |

[0510] TABLE XXXI
HLA Class II Supermotif and Motif-Bearing Epitopes

| | | DRB1* | DRB1* | DRB1* | DRB1* | DRB1* | DRB1* | DRB1* | | | No. of DR |
|---|---|---|---|---|---|---|---|---|---|---|---|
| | | 0101 | 0301 | 0401 | 0701 | 0802 | 1101 | 1302 | *DRB1 | *DRB5 | Alleles |
| Sequence | Source | nM | nM | nM | nM | nM | nM | nM | 1501 nM | 0101 nM | Crossbound |
| VLGVVFGILIKRRQQ | Her2/neu.666 | 71 | — | — | 781 | 77 | 43 | 233 | 827 | 323 | 7 |
| QMRILKETELRKVKV | Her2/neu.711 | 119 | 938 | >8182 | 1923 | 7656 | 4878 | 4375 | 607 | 34 | 3 |
| DEAYVMAGVGSPYVS | Her2/neu.769 | 100 | — | 196 | 125 | 860 | 7407 | 1750 | 3138 | 833 | 5 |
| SRLLGICLTSTVQLV | Her2/neu.783 | 14 | — | 375 | 45 | — | 1429 | 10 | 414 | — | 5 |
| LLNWCMQIAKGMSYL | Her2/neu.822 | 6.0 | — | — | 208 | 120 | 50 | 90 | 1597 | 17 | 6 |
| VRLVHRDLAARNVLV | Her2/neu.839 | 147 | 882 | 3058 | 1087 | 490 | 74 | 81 | 1422 | 6061 | 4 |
| ARLLDIDETEYHADG | Her2/neu.867 | — | 968 | >8182 | — | — | — | — | — | — | 0 |
| IKWMALESILRRRFT | Her2/neu.886 | 17 | 682 | 3224 | 4098 | 731 | 370 | 2500 | 11 | 2.5 | 5 |
| VWELMTFGAKPYDGI | Her2/neu.912 | 58 | — | 818 | 676 | 5506 | 3704 | 8750 | 92 | 200 | 5 |
| CWMIDSECRPRFREL | Her2/neu.958 | 1389 | 667 | >8182 | — | — | — | — | — | 1333 | 0 |

What is claimed is:

1. An isolated prepared HER2/neu epitope consisting of a sequence selected from the group consisting of the sequences set out in Tables XXIII, XXIV, XXV, XXVI, XXVII, and XXXI.

2. A composition of claim 1, wherein the epitope is admixed or joined to a CTL epitope.

3. A composition of claim 2, wherein the CTL epitope is selected from the group set out in claim 1.

4. A composition of claim 1, wherein the epitope is admixed or joined to an HTL epitope.

5. A composition of claim 4, wherein the HTL epitope is selected from the group set out in claim 1.

6. A composition of claim 4, wherein the HTL epitope is a pan-DR binding molecule.

7. A composition of claim 1, comprising at least three epitopes selected from the group set out in claim 1.

8. A composition of claim 1, further comprising a liposome, wherein the epitope is on or within the liposome.

9. A composition of claim 1, wherein the epitope is joined to a lipid.

10. A composition of claim 1, wherein the epitope is joined to a linker.

11. A composition of claim 1, wherein the epitope is bound to an HLA heavy chain, β2-microglobulin, and strepavidin complex, whereby a tetramer is formed.

12. A composition of claim 1, further comprising an antigen presenting cell, wherein the epitope is on or within the antigen presenting cell.

13. A composition of claim 12, wherein the epitope is bound to an HLA molecule on the antigen presenting cell, whereby when a cytotoxic lymphocyte (CTL) or helper T lymphocyte (HTL) is present that is restricted to the HLA molecule, a receptor on the CTL or HTL binds to a complex of the HLA molecule and the epitope.

14. A clonal cytotoxic T lymphocyte (CTL), wherein the CTL is cultured in vitro and binds to a complex of an epitope selected from the group set out in Tables XXIII, XXIV, XXV, XXVI, and XXVII, bound to an HLA molecule.

15. A peptide comprising at least a first and a second epitope, wherein the first epitope is selected from the group consisting of the sequences set out in Tables XXIII, XXIV, XXV, XXVI, XXVII, and XXXI;
wherein the peptide comprise less than 50 contiguous amino acids that have 100% identity with a native peptide sequence.

16. A composition of claim 15, wherein the first and the second epitope are selected from the group of claim 14.

17. A composition of claim 16, further comprising a third epitope selected from the group of claim 15.

18. A composition of claim 15, wherein the peptide is a heteropolymer.

19. A composition of claim 15, wherein the peptide is a homopolymer.

20. A composition of claim 15, wherein the second epitope is a CTL epitope.

21. A composition of claim 20, wherein the CTL epitope is from a tumor associated antigen that is not HER2/neu.

22. A composition of claim 15, wherein the second epitope is a PanDR binding molecule.

23. A composition of claim 1, wherein the first epitope is linked to an a linker sequence.

24. A vaccine composition comprising:
a unit dose of a peptide that comprises less than 50 contiguous amino acids that have 100% identity with a native peptide sequence of HER2/neu, the peptide comprising at least a first epitope selected from the group consisting of the sequences set out in Tables XXIII, XXIV, XXV, XXVI, XXVII, and XXXI; and;
a pharmaceutical excipient.

25. A vaccine composition in accordance with claim 24, further comprising a second epitope.

26. A vaccine composition of claim 24, wherein the second epitope is a PanDR binding molecule.

27. A vaccine composition of claim 24, wherein the pharmaceutical excipient comprises an adjuvant.

28. An isolated nucleic acid encoding a peptide comprising an epitope consisting of a sequence selected from the group consisting of the sequences set out in Tables XXIII, XXIV, XXV, XXVI, XXVII, and XXXI.

29. An isolated nucleic acid encoding a peptide comprising at least a first and a second epitope, wherein the first epitope is selected from the group consisting of the sequences set out in Table XXIII, XXIV, XXV, XXVI, XXVII, and XXXI; and wherein the peptide comprises less than 50 contiguous amino acids that have 100% identity with a native peptide sequence.

30. An isolated nucleic acid of claim 29, wherein the peptide comprises at least two epitopes selected from the sequences set out in claim 29.

31. An isolated nucleic acid of claim 30, wherein the peptide comprises at least three epitopes selected from the sequences set out in claim 29.

32. An isolated nucleic acid of claim 29, wherein the second peptide is a CTL epitope.

33. An isolated nucleic acid of claim 32, wherein the CTL is from a tumor-associated antigen that is not HER2/neu.

34. An isolated nucleic acid of claim 20, wherein the second peptide is an HTL epitope.

The application's sequence listing, which the Patent Office published only in electronic form, follows.

SEQUENCE LISTING (4641 sequences)

SEQ ID NO: 1 - protein, 8 aa, Artificial Sequence
  Artificially Synthesized Peptide
PTNASLSF

SEQ ID NO: 2 - protein, 8 aa, Artificial Sequence
  Artificially Synthesized Peptide
VTYNTDTF

SEQ ID NO: 3 - protein, 8 aa, Artificial Sequence
  Artificially Synthesized Peptide
GTVYKGIW

SEQ ID NO: 4 - protein, 8 aa, Artificial Sequence
  Artificially Synthesized Peptide
FTHQSDVW

SEQ ID NO: 5 - protein, 8 aa, Artificial Sequence
  Artificially Synthesized Peptide
VTACPYNY

SEQ ID NO: 6 - protein, 8 aa, Artificial Sequence
  Artificially Synthesized Peptide
MTFGAKPY

SEQ ID NO: 7 - protein, 8 aa, Artificial Sequence
  Artificially Synthesized Peptide
PTAENPEY

SEQ ID NO: 8 - protein, 8 aa, Artificial Sequence
  Artificially Synthesized Peptide
TILWKDIF

SEQ ID NO: 9 - protein, 8 aa, Artificial Sequence
  Artificially Synthesized Peptide
KIFGSLAF

SEQ ID NO: 10 - protein, 8 aa, Artificial Sequence
  Artificially Synthesized Peptide
DIQEVQGY

SEQ ID NO: 11 - protein, 8 aa, Artificial Sequence
  Artificially Synthesized Peptide
RILHNGAY

SEQ ID NO: 12 - protein, 8 aa, Artificial Sequence
  Artificially Synthesized Peptide
QIAKGMSY

SEQ ID NO: 13 - protein, 8 aa, Artificial Sequence
  Artificially Synthesized Peptide
PICTIDVY

SEQ ID NO: 14 - protein, 8 aa, Artificial Sequence
  Artificially Synthesized Peptide
SLPDLSVF

SEQ ID NO: 15 - protein, 8 aa, Artificial Sequence
  Artificially Synthesized Peptide
YLVPQQGF

SEQ ID NO: 16 - protein, 8 aa, Artificial Sequence
  Artificially Synthesized Peptide
ELAALCRW

SEQ ID NO: 17 - protein, 8 aa, Artificial Sequence
  Artificially Synthesized Peptide
DLSYMPIW

SEQ ID NO: 18 - protein, 8 aa, Artificial Sequence
  Artificially Synthesized Peptide
TLEEITGY

SEQ ID NO: 19 - protein, 8 aa, Artificial Sequence
  Artificially Synthesized Peptide
DLVDAEEY

SEQ ID NO: 20 - protein, 8 aa, Artificial Sequence
  Artificially Synthesized Peptide
IVRGTQLF

SEQ ID NO: 21 - protein, 8 aa, Artificial Sequence
  Artificially Synthesized Peptide
TVPWDQLF

SEQ ID NO: 22 - protein, 8 aa, Artificial Sequence
  Artificially Synthesized Peptide
VVVLGVVF

SEQ ID NO: 23 - protein, 8 aa, Artificial Sequence
  Artificially Synthesized Peptide
KVLGSGAF

SEQ ID NO: 24 - protein, 8 aa, Artificial Sequence
  Artificially Synthesized Peptide
TVWELMTF

SEQ ID NO: 25 - protein, 8 aa, Artificial Sequence
  Artificially Synthesized Peptide
LVPQQGFF

SEQ ID NO: 26 - protein, 8 aa, Artificial Sequence
  Artificially Synthesized Peptide
VVKDVFAF

SEQ ID NO: 27 - protein, 8 aa, Artificial Sequence
  Artificially Synthesized Peptide
GVKPDLSY

SEQ ID NO: 28 - protein, 8 aa, Artificial Sequence
  Artificially Synthesized Peptide
LVTQLMPY

SEQ ID NO: 29 - protein, 8 aa, Artificial Sequence
  Artificially Synthesized Peptide
YMIMVKCW

SEQ ID NO: 30 - protein, 8 aa, Artificial Sequence
  Artificially Synthesized Peptide
TSANIQEF

SEQ ID NO: 31 - protein, 8 aa, Artificial Sequence
  Artificially Synthesized Peptide
ESILRRRF

SEQ ID NO: 32 - protein, 8 aa, Artificial Sequence
  Artificially Synthesized Peptide
DSECRPRF

SEQ ID NO: 33 - protein, 8 aa, Artificial Sequence
  Artificially Synthesized Peptide
ASPLDSTF

SEQ ID NO: 34 - protein, 8 aa, Artificial Sequence
  Artificially Synthesized Peptide
GSQDLLNW

SEQ ID NO: 35 - protein, 8 aa, Artificial Sequence
  Artificially Synthesized Peptide
WSYGVTVW

SEQ ID NO: 36 - protein, 9 aa, Artificial Sequence
  Artificially Synthesized Peptide
DTILWKDIF

SEQ ID NO: 37 - protein, 9 aa, Artificial Sequence
  Artificially Synthesized Peptide
VTSANIQEF

SEQ ID NO: 38 - protein, 9 aa, Artificial Sequence
  Artificially Synthesized Peptide
HTVPWDQLF

SEQ ID NO: 39 - protein, 9 aa, Artificial Sequence
  Artificially Synthesized Peptide
VTVWELMTF

SEQ ID NO: 40 - protein, 9 aa, Artificial Sequence
  Artificially Synthesized Peptide
GTQLFEDNY

SEQ ID NO: 41 - protein, 9 aa, Artificial Sequence
  Artificially Synthesized Peptide
ETLEEITGY

SEQ ID NO: 42 - protein, 9 aa, Artificial Sequence
  Artificially Synthesized Peptide
LTCSPQPEY

SEQ ID NO: 43 - protein, 9 aa, Artificial Sequence
  Artificially Synthesized Peptide
RIVRGTQLF

SEQ ID NO: 44 - protein, 9 aa, Artificial Sequence
  Artificially Synthesized Peptide
SLAFLPESF

SEQ ID NO: 45 - protein, 9 aa, Artificial Sequence
  Artificially Synthesized Peptide
YLVPQQGFF

SEQ ID NO: 46 - protein, 9 aa, Artificial Sequence
  Artificially Synthesized Peptide
TLQGLGISW

SEQ ID NO: 47 - protein, 9 aa, Artificial Sequence
  Artificially Synthesized Peptide
QLCARGHCW

SEQ ID NO: 48 - protein, 9 aa, Artificial Sequence
  Artificially Synthesized Peptide
HLDMLRHLY

SEQ ID NO: 49 - protein, 9 aa, Artificial Sequence
  Artificially Synthesized Peptide
VLQGLPREY

SEQ ID NO: 50 - protein, 9 aa, Artificial Sequence
  Artificially Synthesized Peptide
QLVTQLMPY

SEQ ID NO: 51 - protein, 9 aa, Artificial Sequence
  Artificially Synthesized Peptide
LLDIDETEY

SEQ ID NO: 52 - protein, 9 aa, Artificial Sequence
  Artificially Synthesized Peptide
PLPSETDGY

SEQ ID NO: 53 - protein, 9 aa, Artificial Sequence
  Artificially Synthesized Peptide
LVTYNTDTF

SEQ ID NO: 54 - protein, 9 aa, Artificial Sequence
  Artificially Synthesized Peptide
LVVVLGVVF

SEQ ID NO: 55 - protein, 9 aa, Artificial Sequence
  Artificially Synthesized Peptide
GVVKDVFAF

SEQ ID NO: 56 - protein, 9 aa, Artificial Sequence
  Artificially Synthesized Peptide
CVTACPYNY

SEQ ID NO: 57 - protein, 9 aa, Artificial Sequence
  Artificially Synthesized Peptide
RMARDPQRF

SEQ ID NO: 58 - protein, 9 aa, Artificial Sequence
  Artificially Synthesized Peptide
PMCKGSRCW

SEQ ID NO: 59 - protein, 9 aa, Artificial Sequence
  Artificially Synthesized Peptide
SMPNPEGRY

SEQ ID NO: 60 - protein, 9 aa, Artificial Sequence
  Artificially Synthesized Peptide
VMAGVGSPY

SEQ ID NO: 61 - protein, 9 aa, Artificial Sequence
  Artificially Synthesized Peptide
LMTFGAKPY

SEQ ID NO: 62 - protein, 9 aa, Artificial Sequence
  Artificially Synthesized Peptide
DSLPDLSVF

SEQ ID NO: 63 - protein, 9 aa, Artificial Sequence
  Artificially Synthesized Peptide
LSYMPIWKF

SEQ ID NO: 64 - protein, 9 aa, Artificial Sequence
  Artificially Synthesized Peptide
ASCVTACPY

SEQ ID NO: 65 - protein, 9 aa, Artificial Sequence
  Artificially Synthesized Peptide
GSGAFGTVY

SEQ ID NO: 66 - protein, 9 aa, Artificial Sequence
  Artificially Synthesized Peptide
ASPLDSTFY

SEQ ID NO: 67 - protein, 9 aa, Artificial Sequence
  Artificially Synthesized Peptide
FSPAFDNLY

SEQ ID NO: 68 - protein, 10 aa, Artificial Sequence
  Artificially Synthesized Peptide
PTQCVNCSQF

SEQ ID NO: 69 - protein, 10 aa, Artificial Sequence
  Artificially Synthesized Peptide
ITGYLYISAW

SEQ ID NO: 70 - protein, 10 aa, Artificial Sequence
  Artificially Synthesized Peptide
LTLQGLGISW

SEQ ID NO: 71 - protein, 10 aa, Artificial Sequence
  Artificially Synthesized Peptide
FTHQSDVWSY

SEQ ID NO: 72 - protein, 10 aa, Artificial Sequence
  Artificially Synthesized Peptide
GTPTAENPEY

SEQ ID NO: 73 - protein, 10 aa, Artificial Sequence
  Artificially Synthesized Peptide
LIHHNTHLCF

SEQ ID NO: 74 - protein, 10 aa, Artificial Sequence
  Artificially Synthesized Peptide
MIDSECRPRF

SEQ ID NO: 75 - protein, 10 aa, Artificial Sequence
  Artificially Synthesized Peptide
LIQRNPQLCY

SEQ ID NO: 76 - protein, 10 aa, Artificial Sequence
  Artificially Synthesized Peptide
YLPTNASLSF

SEQ ID NO: 77 - protein, 10 aa, Artificial Sequence
  Artificially Synthesized Peptide
ALVTYNTDTF

SEQ ID NO: 78 - protein, 10 aa, Artificial Sequence
  Artificially Synthesized Peptide
PLQPEQLQVF

SEQ ID NO: 79 - protein, 10 aa, Artificial Sequence
  Artificially Synthesized Peptide
DLSYMPIWKF

SEQ ID NO: 80 - protein, 10 aa, Artificial Sequence
  Artificially Synthesized Peptide
LLVVVLGVVF

SEQ ID NO: 81 - protein, 10 aa, Artificial Sequence
  Artificially Synthesized Peptide
ALESILRRRF

SEQ ID NO: 82 - protein, 10 aa, Artificial Sequence
  Artificially Synthesized Peptide
QLCYQDTILW

SEQ ID NO: 83 - protein, 10 aa, Artificial Sequence
  Artificially Synthesized Peptide
HLCFVHTVPW

SEQ ID NO: 84 - protein, 10 aa, Artificial Sequence
  Artificially Synthesized Peptide
RLGSQDLLNW

SEQ ID NO: 85 - protein, 10 aa, Artificial Sequence
  Artificially Synthesized Peptide
ELHCPALVTY

SEQ ID NO: 86 - protein, 10 aa, Artificial Sequence
  Artificially Synthesized Peptide
TLEEITGYLY

SEQ ID NO: 87 - protein, 10 aa, Artificial Sequence
  Artificially Synthesized Peptide
RLLDIDETEY

SEQ ID NO: 88 - protein, 10 aa, Artificial Sequence
  Artificially Synthesized Peptide
ELMTFGAKPY

SEQ ID NO: 89 - protein, 10 aa, Artificial Sequence
  Artificially Synthesized Peptide
PLTCSPQPEY

SEQ ID NO: 90 - protein, 10 aa, Artificial Sequence
  Artificially Synthesized Peptide
AVTSANIQEF

SEQ ID NO: 91 - protein, 10 aa, Artificial Sequence
  Artificially Synthesized Peptide
KVKVLGSGAF

SEQ ID NO: 92 - protein, 10 aa, Artificial Sequence
  Artificially Synthesized Peptide
GVTVWELMTF

SEQ ID NO: 93 - protein, 10 aa, Artificial Sequence
  Artificially Synthesized Peptide
DVWSYGVTVW

SEQ ID NO: 94 - protein, 10 aa, Artificial Sequence
  Artificially Synthesized Peptide
DVYMIMVKCW

SEQ ID NO: 95 - protein, 10 aa, Artificial Sequence
  Artificially Synthesized Peptide
VVQGNLELTY

SEQ ID NO: 96 - protein, 10 aa, Artificial Sequence
  Artificially Synthesized Peptide
RVLQGLPREY

SEQ ID NO: 97 - protein, 10 aa, Artificial Sequence
  Artificially Synthesized Peptide
YVMAGVGSPY

SEQ ID NO: 98 - protein, 10 aa, Artificial Sequence
  Artificially Synthesized Peptide
CMQIAKGMSY

SEQ ID NO: 99 - protein, 10 aa, Artificial Sequence
  Artificially Synthesized Peptide
HSDCLACLHF

SEQ ID NO: 100 - protein, 10 aa, Artificial Sequence
  Artificially Synthesized Peptide
GSLAFLPESF

SEQ ID NO: 101 - protein, 10 aa, Artificial Sequence
  Artificially Synthesized Peptide
PSEGAGSDVF

SEQ ID NO: 102 - protein, 10 aa, Artificial Sequence
  Artificially Synthesized Peptide
ESMPNPEGRY

SEQ ID NO: 103 - protein, 10 aa, Artificial Sequence
  Artificially Synthesized Peptide
CSKPCARVCY

SEQ ID NO: 104 - protein, 10 aa, Artificial Sequence
  Artificially Synthesized Peptide
PSGVKPDLSY

SEQ ID NO: 105 - protein, 10 aa, Artificial Sequence
  Artificially Synthesized Peptide
FSPAFDNLYY

SEQ ID NO: 106 - protein, 11 aa, Artificial Sequence
  Artificially Synthesized Peptide
ETHLDMLRHLY

SEQ ID NO: 107 - protein, 11 aa, Artificial Sequence
  Artificially Synthesized Peptide
ETLEEITGYLY

SEQ ID NO: 108 - protein, 11 aa, Artificial Sequence
  Artificially Synthesized Peptide
PTHDPSPLQRY

SEQ ID NO: 109 - protein, 11 aa, Artificial Sequence
  Artificially Synthesized Peptide
EITGYLYISAW

SEQ ID NO: 110 - protein, 11 aa, Artificial Sequence
  Artificially Synthesized Peptide
RLRIVRGTQLF

SEQ ID NO: 111 - protein, 11 aa, Artificial Sequence
  Artificially Synthesized Peptide
ALIHHNTHLCF

SEQ ID NO: 112 - protein, 11 aa, Artificial Sequence
  Artificially Synthesized Peptide
ILLVVVLGVVF

SEQ ID NO: 113 - protein, 11 aa, Artificial Sequence
  Artificially Synthesized Peptide
SLTLQGLGISW

SEQ ID NO: 114 - protein, 11 aa, Artificial Sequence
  Artificially Synthesized Peptide
FLQDIQEVQGY

SEQ ID NO: 115 - protein, 11 aa, Artificial Sequence
  Artificially Synthesized Peptide
VLIQRNPQLCY

SEQ ID NO: 116 - protein, 11 aa, Artificial Sequence
  Artificially Synthesized Peptide
VLGSGAFGTVY

SEQ ID NO: 117 - protein, 11 aa, Artificial Sequence
  Artificially Synthesized Peptide
FVHTVPWDQLF

SEQ ID NO: 118 - protein, 11 aa, Artificial Sequence
  Artificially Synthesized Peptide
QVVQGNLELTY

SEQ ID NO: 119 - protein, 11 aa, Artificial Sequence
  Artificially Synthesized Peptide
TVQLVTQLMPY

SEQ ID NO: 120 - protein, 11 aa, Artificial Sequence
  Artificially Synthesized Peptide
TVPLPSETDGY

SEQ ID NO: 121 - protein, 11 aa, Artificial Sequence
  Artificially Synthesized Peptide
SMPNPEGRYTF

SEQ ID NO: 122 - protein, 11 aa, Artificial Sequence
  Artificially Synthesized Peptide
WMIDSECRPRF

SEQ ID NO: 123 - protein, 11 aa, Artificial Sequence
  Artificially Synthesized Peptide
DMGDLVDAEEY

SEQ ID NO: 124 - protein, 11 aa, Artificial Sequence
  Artificially Synthesized Peptide
KSPNHVKITDF

SEQ ID NO: 125 - protein, 11 aa, Artificial Sequence
  Artificially Synthesized Peptide
FSRMARDPQRF

SEQ ID NO: 126 - protein, 11 aa, Artificial Sequence
  Artificially Synthesized Peptide
CSPMCKGSRCW

SEQ ID NO: 127 - protein, 11 aa, Artificial Sequence
  Artificially Synthesized Peptide
FSPAFDNLYYW

SEQ ID NO: 128 - protein, 11 aa, Artificial Sequence
  Artificially Synthesized Peptide
ASCVTACPYNY

SEQ ID NO: 129 - protein, 8 aa, Artificial Sequence
  Artificially Synthesized Peptide
AAKGLQSL

SEQ ID NO: 130 - protein, 10 aa, Artificial Sequence
  Artificially Synthesized Peptide
AAKGLQSLPT

SEQ ID NO: 131 - protein, 8 aa, Artificial Sequence
  Artificially Synthesized Peptide
AALCRWGL

SEQ ID NO: 132 - protein, 9 aa, Artificial Sequence
  Artificially Synthesized Peptide
AALCRWGLL

SEQ ID NO: 133 - protein, 10 aa, Artificial Sequence
  Artificially Synthesized Peptide
AALCRWGLLL

SEQ ID NO: 134 - protein, 11 aa, Artificial Sequence
  Artificially Synthesized Peptide
AALCRWGLLLA

SEQ ID NO: 135 - protein, 10 aa, Artificial Sequence
  Artificially Synthesized Peptide
AAPQPHPPPA

SEQ ID NO: 136 - protein, 8 aa, Artificial Sequence
  Artificially Synthesized Peptide
AARPAGAT

SEQ ID NO: 137 - protein, 9 aa, Artificial Sequence
  Artificially Synthesized Peptide
AARPAGATL

SEQ ID NO: 138 - protein, 8 aa, Artificial Sequence
  Artificially Synthesized Peptide
AASTQVCT

SEQ ID NO: 139 - protein, 10 aa, Artificial Sequence
  Artificially Synthesized Peptide
AASTQVCTGT

SEQ ID NO: 140 - protein, 9 aa, Artificial Sequence
  Artificially Synthesized Peptide
AIKVLRENT

SEQ ID NO: 141 - protein, 11 aa, Artificial Sequence
  Artificially Synthesized Peptide
ALAVLDNGDPL

SEQ ID NO: 142 - protein, 8 aa, Artificial Sequence
  Artificially Synthesized Peptide
ALCRWGLL

SEQ ID NO: 143 - protein, 9 aa, Artificial Sequence
  Artificially Synthesized Peptide
ALCRWGLLL

SEQ ID NO: 144 - protein, 10 aa, Artificial Sequence
  Artificially Synthesized Peptide
ALCRWGLLLA

SEQ ID NO: 145 - protein, 11 aa, Artificial Sequence
  Artificially Synthesized Peptide
ALCRWGLLLAL

SEQ ID NO: 146 - protein, 11 aa, Artificial Sequence
  Artificially Synthesized Peptide
ALESILRRRFT

SEQ ID NO: 147 - protein, 9 aa, Artificial Sequence
  Artificially Synthesized Peptide
ALIHHNTHL

SEQ ID NO: 148 - protein, 8 aa, Artificial Sequence
  Artificially Synthesized Peptide
ALLPPGAA

SEQ ID NO: 149 - protein, 10 aa, Artificial Sequence
  Artificially Synthesized Peptide
ALLPPGAAST

SEQ ID NO: 150 - protein, 9 aa, Artificial Sequence
  Artificially Synthesized Peptide
ALVTYNTDT

SEQ ID NO: 151 - protein, 8 aa, Artificial Sequence
  Artificially Synthesized Peptide
AMPNQAQM

SEQ ID NO: 152 - protein, 10 aa, Artificial Sequence
  Artificially Synthesized Peptide
AMPNQAQMRI

SEQ ID NO: 153 - protein, 11 aa, Artificial Sequence
  Artificially Synthesized Peptide
AMPNQAQMRIL

SEQ ID NO: 154 - protein, 9 aa, Artificial Sequence
  Artificially Synthesized Peptide
AQMRILKET

SEQ ID NO: 155 - protein, 11 aa, Artificial Sequence
  Artificially Synthesized Peptide
AQMRILKETEL

SEQ ID NO: 156 - protein, 8 aa, Artificial Sequence
  Artificially Synthesized Peptide
ATLERPKT

SEQ ID NO: 157 - protein, 9 aa, Artificial Sequence
  Artificially Synthesized Peptide
ATLERPKTL

SEQ ID NO: 158 - protein, 8 aa, Artificial Sequence
  Artificially Synthesized Peptide
AVENPEYL

SEQ ID NO: 159 - protein, 9 aa, Artificial Sequence
  Artificially Synthesized Peptide
AVENPEYLT

SEQ ID NO: 160 - protein, 9 aa, Artificial Sequence
  Artificially Synthesized Peptide
AVLDNGDPL

SEQ ID NO: 161 - protein, 11 aa, Artificial Sequence
  Artificially Synthesized Peptide
AVTSANIQEFA

SEQ ID NO: 162 - protein, 8 aa, Artificial Sequence
  Artificially Synthesized Peptide
AVVGILLV

SEQ ID NO: 163 - protein, 9 aa, Artificial Sequence
  Artificially Synthesized Peptide
AVVGILLVV

SEQ ID NO: 164 - protein, 10 aa, Artificial Sequence
  Artificially Synthesized Peptide
AVVGILLVVV

SEQ ID NO: 165 - protein, 11 aa, Artificial Sequence
  Artificially Synthesized Peptide
AVVGILLVVVL

SEQ ID NO: 166 - protein, 11 aa, Artificial Sequence
  Artificially Synthesized Peptide
CAHYKDPPFCV

SEQ ID NO: 167 - protein, 8 aa, Artificial Sequence
  Artificially Synthesized Peptide
CARCKGPL

SEQ ID NO: 168 - protein, 10 aa, Artificial Sequence
  Artificially Synthesized Peptide
CARCKGPLPT

SEQ ID NO: 169 - protein, 8 aa, Artificial Sequence
  Artificially Synthesized Peptide
CARVCYGL

SEQ ID NO: 170 - protein, 10 aa, Artificial Sequence
  Artificially Synthesized Peptide
CARVCYGLGM

SEQ ID NO: 171 - protein, 9 aa, Artificial Sequence
  Artificially Synthesized Peptide
CLHFNHSGI

SEQ ID NO: 172 - protein, 8 aa, Artificial Sequence
  Artificially Synthesized Peptide
CLTSTVQL

SEQ ID NO: 173 - protein, 9 aa, Artificial Sequence
  Artificially Synthesized Peptide
CLTSTVQLV

SEQ ID NO: 174 - protein, 10 aa, Artificial Sequence
  Artificially Synthesized Peptide
CLTSTVQLVT

SEQ ID NO: 175 - protein, 8 aa, Artificial Sequence
  Artificially Synthesized Peptide
CMQIAKGM

SEQ ID NO: 176 - protein, 11 aa, Artificial Sequence
  Artificially Synthesized Peptide
CMQIAKGMSYL

SEQ ID NO: 177 - protein, 9 aa, Artificial Sequence
  Artificially Synthesized Peptide
CQPCPINCT

SEQ ID NO: 178 - protein, 8 aa, Artificial Sequence
  Artificially Synthesized Peptide
CQPQNGSV

SEQ ID NO: 179 - protein, 9 aa, Artificial Sequence
  Artificially Synthesized Peptide
CQPQNGSVT

SEQ ID NO: 180 - protein, 8 aa, Artificial Sequence
  Artificially Synthesized Peptide
CQSLTRTV

SEQ ID NO: 181 - protein, 10 aa, Artificial Sequence
  Artificially Synthesized Peptide
CQSLTRTVCA

SEQ ID NO: 182 - protein, 8 aa, Artificial Sequence
  Artificially Synthesized Peptide
CQVVQGNL

SEQ ID NO: 183 - protein, 10 aa, Artificial Sequence
  Artificially Synthesized Peptide
CQVVQGNLEL

SEQ ID NO: 184 - protein, 11 aa, Artificial Sequence
  Artificially Synthesized Peptide
CQVVQGNLELT

SEQ ID NO: 185 - protein, 10 aa, Artificial Sequence
  Artificially Synthesized Peptide
CTGPKHSDCL

SEQ ID NO: 186 - protein, 11 aa, Artificial Sequence
  Artificially Synthesized Peptide
CTGPKHSDCLA

SEQ ID NO: 187 - protein, 8 aa, Artificial Sequence
  Artificially Synthesized Peptide
CTGTDMKL

SEQ ID NO: 188 - protein, 10 aa, Artificial Sequence
  Artificially Synthesized Peptide
CTGTDMKLRL

SEQ ID NO: 189 - protein, 8 aa, Artificial Sequence
  Artificially Synthesized Peptide
CTHSCVDL

SEQ ID NO: 190 - protein, 8 aa, Artificial Sequence
  Artificially Synthesized Peptide
CTIDVYMI

SEQ ID NO: 191 - protein, 9 aa, Artificial Sequence
  Artificially Synthesized Peptide
CTIDVYMIM

SEQ ID NO: 192 - protein, 10 aa, Artificial Sequence
  Artificially Synthesized Peptide
CTIDVYMIMV

SEQ ID NO: 193 - protein, 9 aa, Artificial Sequence
  Artificially Synthesized Peptide
CVARCPSGV

SEQ ID NO: 194 - protein, 11 aa, Artificial Sequence
  Artificially Synthesized Peptide
CVDLDDKGCPA

SEQ ID NO: 195 - protein, 8 aa, Artificial Sequence
  Artificially Synthesized Peptide
CVEECRVL

SEQ ID NO: 196 - protein, 11 aa, Artificial Sequence
  Artificially Synthesized Peptide
CVEECRVLQGL

SEQ ID NO: 197 - protein, 11 aa, Artificial Sequence
  Artificially Synthesized Peptide
CVGEGLACHQL

SEQ ID NO: 198 - protein, 8 aa, Artificial Sequence
  Artificially Synthesized Peptide
CVNCSQFL

SEQ ID NO: 199 - protein, 10 aa, Artificial Sequence
  Artificially Synthesized Peptide
CVTACPYNYL

SEQ ID NO: 200 - protein, 9 aa, Artificial Sequence
  Artificially Synthesized Peptide
DIDETEYHA

SEQ ID NO: 201 - protein, 9 aa, Artificial Sequence
  Artificially Synthesized Peptide
DIFHKNNQL

SEQ ID NO: 202 - protein, 10 aa, Artificial Sequence
  Artificially Synthesized Peptide
DIFHKNNQLA

SEQ ID NO: 203 - protein, 11 aa, Artificial Sequence
  Artificially Synthesized Peptide
DIFHKNNQLAL

SEQ ID NO: 204 - protein, 9 aa, Artificial Sequence
  Artificially Synthesized Peptide
DIQEVQGYV

SEQ ID NO: 205 - protein, 10 aa, Artificial Sequence
  Artificially Synthesized Peptide
DIQEVQGYVL

SEQ ID NO: 206 - protein, 11 aa, Artificial Sequence
  Artificially Synthesized Peptide
DIQEVQGYVLI

SEQ ID NO: 207 - protein, 8 aa, Artificial Sequence
  Artificially Synthesized Peptide
DLAARNVL

SEQ ID NO: 208 - protein, 9 aa, Artificial Sequence
  Artificially Synthesized Peptide
DLAARNVLV

SEQ ID NO: 209 - protein, 9 aa, Artificial Sequence
  Artificially Synthesized Peptide
DLDDKGCPA

SEQ ID NO: 210 - protein, 10 aa, Artificial Sequence
  Artificially Synthesized Peptide
DLGMGAAKGL

SEQ ID NO: 211 - protein, 8 aa, Artificial Sequence
  Artificially Synthesized Peptide
DLGPASPL

SEQ ID NO: 212 - protein, 11 aa, Artificial Sequence
  Artificially Synthesized Peptide
DLGPASPLDST

SEQ ID NO: 213 - protein, 9 aa, Artificial Sequence
  Artificially Synthesized Peptide
DLLEKGERL

SEQ ID NO: 214 - protein, 9 aa, Artificial Sequence
  Artificially Synthesized Peptide
DLLNWCMQI

SEQ ID NO: 215 - protein, 10 aa, Artificial Sequence
  Artificially Synthesized Peptide
DLLNWCMQIA

SEQ ID NO: 216 - protein, 8 aa, Artificial Sequence
  Artificially Synthesized Peptide
DLSVFQNL

SEQ ID NO: 217 - protein, 10 aa, Artificial Sequence
  Artificially Synthesized Peptide
DLSVFQNLQV

SEQ ID NO: 218 - protein, 11 aa, Artificial Sequence
  Artificially Synthesized Peptide
DLSVFQNLQVI

SEQ ID NO: 219 - protein, 9 aa, Artificial Sequence
  Artificially Synthesized Peptide
DLVDAEEYL

SEQ ID NO: 220 - protein, 10 aa, Artificial Sequence
  Artificially Synthesized Peptide
DLVDAEEYLV

SEQ ID NO: 221 - protein, 8 aa, Artificial Sequence
  Artificially Synthesized Peptide
DMGDLVDA

SEQ ID NO: 222 - protein, 8 aa, Artificial Sequence
  Artificially Synthesized Peptide
DMKLRLPA

SEQ ID NO: 223 - protein, 9 aa, Artificial Sequence
  Artificially Synthesized Peptide
DQDPPERGA

SEQ ID NO: 224 - protein, 10 aa, Artificial Sequence
  Artificially Synthesized Peptide
DQLFRNPHQA

SEQ ID NO: 225 - protein, 11 aa, Artificial Sequence
  Artificially Synthesized Peptide
DQLFRNPHQAL

SEQ ID NO: 226 - protein, 8 aa, Artificial Sequence
  Artificially Synthesized Peptide
DTILWKDI

SEQ ID NO: 227 - protein, 8 aa, Artificial Sequence
  Artificially Synthesized Peptide
DVFAFGGA

SEQ ID NO: 228 - protein, 9 aa, Artificial Sequence
  Artificially Synthesized Peptide
DVFAFGGAV

SEQ ID NO: 229 - protein, 9 aa, Artificial Sequence
  Artificially Synthesized Peptide
DVFDGDLGM

SEQ ID NO: 230 - protein, 11 aa, Artificial Sequence
  Artificially Synthesized Peptide
DVFDGDLGMGA

SEQ ID NO: 231 - protein, 8 aa, Artificial Sequence
  Artificially Synthesized Peptide
DVGSCTLV

SEQ ID NO: 232 - protein, 11 aa, Artificial Sequence
  Artificially Synthesized Peptide
DVGSCTLVCPL

SEQ ID NO: 233 - protein, 9 aa, Artificial Sequence
  Artificially Synthesized Peptide
DVRLVHRDL

SEQ ID NO: 234 - protein, 10 aa, Artificial Sequence
  Artificially Synthesized Peptide
DVRLVHRDLA

SEQ ID NO: 235 - protein, 11 aa, Artificial Sequence
  Artificially Synthesized Peptide
DVRLVHRDLAA

SEQ ID NO: 236 - protein, 8 aa, Artificial Sequence
  Artificially Synthesized Peptide
DVWSYGVT

SEQ ID NO: 237 - protein, 9 aa, Artificial Sequence
  Artificially Synthesized Peptide
DVWSYGVTV

SEQ ID NO: 238 - protein, 11 aa, Artificial Sequence
  Artificially Synthesized Peptide
DVYMIMVKCWM

SEQ ID NO: 239 - protein, 9 aa, Artificial Sequence
  Artificially Synthesized Peptide
EADQCVACA

SEQ ID NO: 240 - protein, 8 aa, Artificial Sequence
  Artificially Synthesized Peptide
EAPRSPLA

SEQ ID NO: 241 - protein, 8 aa, Artificial Sequence
  Artificially Synthesized Peptide
EAYVMAGV

SEQ ID NO: 242 - protein, 8 aa, Artificial Sequence
  Artificially Synthesized Peptide
EILDEAYV

SEQ ID NO: 243 - protein, 9 aa, Artificial Sequence
  Artificially Synthesized Peptide
EILDEAYVM

SEQ ID NO: 244 - protein, 10 aa, Artificial Sequence
  Artificially Synthesized Peptide
EILDEAYVMA

SEQ ID NO: 245 - protein, 8 aa, Artificial Sequence
  Artificially Synthesized Peptide
EILKGGVL

SEQ ID NO: 246 - protein, 9 aa, Artificial Sequence
  Artificially Synthesized Peptide
EILKGGVLI

SEQ ID NO: 247 - protein, 8 aa, Artificial Sequence
  Artificially Synthesized Peptide
EITGYLYI

SEQ ID NO: 248 - protein, 10 aa, Artificial Sequence
  Artificially Synthesized Peptide
EITGYLYISA

SEQ ID NO: 249 - protein, 10 aa, Artificial Sequence
  Artificially Synthesized Peptide
ELAALCRWGL

SEQ ID NO: 250 - protein, 11 aa, Artificial Sequence
  Artificially Synthesized Peptide
ELAALCRWGLL

SEQ ID NO: 251 - protein, 8 aa, Artificial Sequence
  Artificially Synthesized Peptide
ELGSGLAL

SEQ ID NO: 252 - protein, 9 aa, Artificial Sequence
  Artificially Synthesized Peptide
ELGSGLALI

SEQ ID NO: 253 - protein, 8 aa, Artificial Sequence
  Artificially Synthesized Peptide
ELHCPALV

SEQ ID NO: 254 - protein, 9 aa, Artificial Sequence
  Artificially Synthesized Peptide
ELHCPALVT

SEQ ID NO: 255 - protein, 8 aa, Artificial Sequence
  Artificially Synthesized Peptide
ELQLRSLT

SEQ ID NO: 256 - protein, 10 aa, Artificial Sequence
  Artificially Synthesized Peptide
ELQLRSLTEI

SEQ ID NO: 257 - protein, 11 aa, Artificial Sequence
  Artificially Synthesized Peptide
ELQLRSLTEIL

SEQ ID NO: 258 - protein, 8 aa, Artificial Sequence
  Artificially Synthesized Peptide
ELRKVKVL

SEQ ID NO: 259 - protein, 9 aa, Artificial Sequence
  Artificially Synthesized Peptide
ELTYLPTNA

SEQ ID NO: 260 - protein, 11 aa, Artificial Sequence
  Artificially Synthesized Peptide
ELTYLPTNASL

SEQ ID NO: 261 - protein, 11 aa, Artificial Sequence
  Artificially Synthesized Peptide
ELVEPLTPSGA

SEQ ID NO: 262 - protein, 9 aa, Artificial Sequence
  Artificially Synthesized Peptide
ELVSEFSRM

SEQ ID NO: 263 - protein, 10 aa, Artificial Sequence
  Artificially Synthesized Peptide
ELVSEFSRMA

SEQ ID NO: 264 - protein, 8 aa, Artificial Sequence
  Artificially Synthesized Peptide
EQCAAGCT

SEQ ID NO: 265 - protein, 8 aa, Artificial Sequence
  Artificially Synthesized Peptide
EQLQVFET

SEQ ID NO: 266 - protein, 9 aa, Artificial Sequence
  Artificially Synthesized Peptide
EQLQVFETL

SEQ ID NO: 267 - protein, 8 aa, Artificial Sequence
  Artificially Synthesized Peptide
EQRASPLT

SEQ ID NO: 268 - protein, 10 aa, Artificial Sequence
  Artificially Synthesized Peptide
EQRASPLTSI

SEQ ID NO: 269 - protein, 11 aa, Artificial Sequence
  Artificially Synthesized Peptide
EQRASPLTSII

SEQ ID NO: 270 - protein, 9 aa, Artificial Sequence
  Artificially Synthesized Peptide
ETDGYVAPL

SEQ ID NO: 271 - protein, 10 aa, Artificial Sequence
  Artificially Synthesized Peptide
ETDGYVAPLT

SEQ ID NO: 272 - protein, 9 aa, Artificial Sequence
  Artificially Synthesized Peptide
ETELRKVKV

SEQ ID NO: 273 - protein, 10 aa, Artificial Sequence
  Artificially Synthesized Peptide
ETELRKVKVL

SEQ ID NO: 274 - protein, 8 aa, Artificial Sequence
  Artificially Synthesized Peptide
ETELVEPL

SEQ ID NO: 275 - protein, 9 aa, Artificial Sequence
  Artificially Synthesized Peptide
ETELVEPLT

SEQ ID NO: 276 - protein, 11 aa, Artificial Sequence
  Artificially Synthesized Peptide
ETEYHADGGKV

SEQ ID NO: 277 - protein, 10 aa, Artificial Sequence
  Artificially Synthesized Peptide
ETHLDMLRHL

SEQ ID NO: 278 - protein, 10 aa, Artificial Sequence
  Artificially Synthesized Peptide
ETLEEITGYL

SEQ ID NO: 279 - protein, 8 aa, Artificial Sequence
  Artificially Synthesized Peptide
EVQGYVLI

SEQ ID NO: 280 - protein, 9 aa, Artificial Sequence
  Artificially Synthesized Peptide
EVQGYVLIA

SEQ ID NO: 281 - protein, 8 aa, Artificial Sequence
  Artificially Synthesized Peptide
EVRAVTSA

SEQ ID NO: 282 - protein, 10 aa, Artificial Sequence
  Artificially Synthesized Peptide
EVRAVTSANI

SEQ ID NO: 283 - protein, 8 aa, Artificial Sequence
  Artificially Synthesized Peptide
EVTAEDGT

SEQ ID NO: 284 - protein, 11 aa, Artificial Sequence
  Artificially Synthesized Peptide
FAGCKKIFGSL

SEQ ID NO: 285 - protein, 11 aa, Artificial Sequence
  Artificially Synthesized Peptide
FLPESFDGDPA

SEQ ID NO: 286 - protein, 8 aa, Artificial Sequence
  Artificially Synthesized Peptide
FLQDIQEV

SEQ ID NO: 287 - protein, 8 aa, Artificial Sequence
  Artificially Synthesized Peptide
FLRGQECV

SEQ ID NO: 288 - protein, 11 aa, Artificial Sequence
  Artificially Synthesized Peptide
FQNLQVIRGRI

SEQ ID NO: 289 - protein, 10 aa, Artificial Sequence
  Artificially Synthesized Peptide
FVHTVPWDQL

SEQ ID NO: 290 - protein, 9 aa, Artificial Sequence
  Artificially Synthesized Peptide
FVVIQNEDL

SEQ ID NO: 291 - protein, 9 aa, Artificial Sequence
  Artificially Synthesized Peptide
GAAKGLQSL

SEQ ID NO: 292 - protein, 11 aa, Artificial Sequence
  Artificially Synthesized Peptide
GAAKGLQSLPT

SEQ ID NO: 293 - protein, 11 aa, Artificial Sequence
  Artificially Synthesized Peptide
GAAPQPHPPPA

SEQ ID NO: 294 - protein, 9 aa, Artificial Sequence
  Artificially Synthesized Peptide
GAASTQVCT

SEQ ID NO: 295 - protein, 11 aa, Artificial Sequence
  Artificially Synthesized Peptide
GAASTQVCTGT

SEQ ID NO: 296 - protein, 8 aa, Artificial Sequence
  Artificially Synthesized Peptide
GACQPCPI

SEQ ID NO: 297 - protein, 11 aa, Artificial Sequence
  Artificially Synthesized Peptide
GACQPCPINCT

SEQ ID NO: 298 - protein, 10 aa, Artificial Sequence
  Artificially Synthesized Peptide
GAFGTVYKGI

SEQ ID NO: 299 - protein, 11 aa, Artificial Sequence
  Artificially Synthesized Peptide
GAGSDVFDGDL

SEQ ID NO: 300 - protein, 8 aa, Artificial Sequence
  Artificially Synthesized Peptide
GAKPYDGI

SEQ ID NO: 301 - protein, 10 aa, Artificial Sequence
  Artificially Synthesized Peptide
GAKPYDGIPA

SEQ ID NO: 302 - protein, 9 aa, Artificial Sequence
  Artificially Synthesized Peptide
GAMPNQAQM

SEQ ID NO: 303 - protein, 11 aa, Artificial Sequence
  Artificially Synthesized Peptide
GAMPNQAQMRI

SEQ ID NO: 304 - protein, 10 aa, Artificial Sequence
  Artificially Synthesized Peptide
GAPPSTFKGT

SEQ ID NO: 305 - protein, 10 aa, Artificial Sequence
  Artificially Synthesized Peptide
GASPGGLREL

SEQ ID NO: 306 - protein, 9 aa, Artificial Sequence
  Artificially Synthesized Peptide
GATLERPKT

SEQ ID NO: 307 - protein, 10 aa, Artificial Sequence
  Artificially Synthesized Peptide
GATLERPKTL

SEQ ID NO: 308 - protein, 9 aa, Artificial Sequence
  Artificially Synthesized Peptide
GAVENPEYL

SEQ ID NO: 309 - protein, 10 aa, Artificial Sequence
  Artificially Synthesized Peptide
GAVENPEYLT

SEQ ID NO: 310 - protein, 10 aa, Artificial Sequence
  Artificially Synthesized Peptide
GAYSLTLQGL

SEQ ID NO: 311 - protein, 9 aa, Artificial Sequence
  Artificially Synthesized Peptide
GICELHCPA

SEQ ID NO: 312 - protein, 10 aa, Artificial Sequence
  Artificially Synthesized Peptide
GICELHCPAL

SEQ ID NO: 313 - protein, 11 aa, Artificial Sequence
  Artificially Synthesized Peptide
GICELHCPALV

SEQ ID NO: 314 - protein, 8 aa, Artificial Sequence
  Artificially Synthesized Peptide
GICLTSTV

SEQ ID NO: 315 - protein, 10 aa, Artificial Sequence
  Artificially Synthesized Peptide
GICLTSTVQL

SEQ ID NO: 316 - protein, 11 aa, Artificial Sequence
  Artificially Synthesized Peptide
GICLTSTVQLV

SEQ ID NO: 317 - protein, 11 aa, Artificial Sequence
  Artificially Synthesized Peptide
GILIKRRQQKI

SEQ ID NO: 318 - protein, 8 aa, Artificial Sequence
  Artificially Synthesized Peptide
GILLVVVL

SEQ ID NO: 319 - protein, 10 aa, Artificial Sequence
  Artificially Synthesized Peptide
GILLVVVLGV

SEQ ID NO: 320 - protein, 11 aa, Artificial Sequence
  Artificially Synthesized Peptide
GILLVVVLGVV

SEQ ID NO: 321 - protein, 10 aa, Artificial Sequence
  Artificially Synthesized Peptide
GIPAREIPDL

SEQ ID NO: 322 - protein, 11 aa, Artificial Sequence
  Artificially Synthesized Peptide
GIPAREIPDLL

SEQ ID NO: 323 - protein, 10 aa, Artificial Sequence
  Artificially Synthesized Peptide
GISWLGLRSL

SEQ ID NO: 324 - protein, 10 aa, Artificial Sequence
  Artificially Synthesized Peptide
GIWIPDGENV

SEQ ID NO: 325 - protein, 9 aa, Artificial Sequence
  Artificially Synthesized Peptide
GLACHQLCA

SEQ ID NO: 326 - protein, 9 aa, Artificial Sequence
  Artificially Synthesized Peptide
GLALIHHNT

SEQ ID NO: 327 - protein, 11 aa, Artificial Sequence
  Artificially Synthesized Peptide
GLALIHHNTHL

SEQ ID NO: 328 - protein, 8 aa, Artificial Sequence
  Artificially Synthesized Peptide
GLARLLDI

SEQ ID NO: 329 - protein, 11 aa, Artificial Sequence
  Artificially Synthesized Peptide
GLARLLDIDET

SEQ ID NO: 330 - protein, 9 aa, Artificial Sequence
  Artificially Synthesized Peptide
GLEPSEEEA

SEQ ID NO: 331 - protein, 9 aa, Artificial Sequence
  Artificially Synthesized Peptide
GLGISWLGL

SEQ ID NO: 332 - protein, 10 aa, Artificial Sequence
  Artificially Synthesized Peptide
GLGMEHLREV

SEQ ID NO: 333 - protein, 11 aa, Artificial Sequence
  Artificially Synthesized Peptide
GLLLALLPPGA

SEQ ID NO: 334 - protein, 9 aa, Artificial Sequence
  Artificially Synthesized Peptide
GLPREYVNA

SEQ ID NO: 335 - protein, 10 aa, Artificial Sequence
  Artificially Synthesized Peptide
GLRELQLRSL

SEQ ID NO: 336 - protein, 11 aa, Artificial Sequence
  Artificially Synthesized Peptide
GLRELQLRSLT

SEQ ID NO: 337 - protein, 8 aa, Artificial Sequence
  Artificially Synthesized Peptide
GLRSLREL

SEQ ID NO: 338 - protein, 8 aa, Artificial Sequence
  Artificially Synthesized Peptide
GMEHLREV

SEQ ID NO: 339 - protein, 10 aa, Artificial Sequence
  Artificially Synthesized Peptide
GMEHLREVRA

SEQ ID NO: 340 - protein, 11 aa, Artificial Sequence
  Artificially Synthesized Peptide
GMEHLREVRAV

SEQ ID NO: 341 - protein, 8 aa, Artificial Sequence
  Artificially Synthesized Peptide
GMGAAKGL

SEQ ID NO: 342 - protein, 11 aa, Artificial Sequence
  Artificially Synthesized Peptide
GMGAAKGLQSL

SEQ ID NO: 343 - protein, 8 aa, Artificial Sequence
  Artificially Synthesized Peptide
GMSYLEDV

SEQ ID NO: 344 - protein, 10 aa, Artificial Sequence
  Artificially Synthesized Peptide
GMSYLEDVRL

SEQ ID NO: 345 - protein, 11 aa, Artificial Sequence
  Artificially Synthesized Peptide
GMSYLEDVRLV

SEQ ID NO: 346 - protein, 10 aa, Artificial Sequence
  Artificially Synthesized Peptide
GQECVEECRV

SEQ ID NO: 347 - protein, 11 aa, Artificial Sequence
  Artificially Synthesized Peptide
GQECVEECRVL

SEQ ID NO: 348 - protein, 8 aa, Artificial Sequence
  Artificially Synthesized Peptide
GTDMKLRL

SEQ ID NO: 349 - protein, 10 aa, Artificial Sequence
  Artificially Synthesized Peptide
GTDMKLRLPA

SEQ ID NO: 350 - protein, 11 aa, Artificial Sequence
  Artificially Synthesized Peptide
GTPTAENPEYL

SEQ ID NO: 351 - protein, 10 aa, Artificial Sequence
  Artificially Synthesized Peptide
GTQLFEDNYA

SEQ ID NO: 352 - protein, 11 aa, Artificial Sequence
  Artificially Synthesized Peptide
GTQLFEDNYAL

SEQ ID NO: 353 - protein, 9 aa, Artificial Sequence
  Artificially Synthesized Peptide
GTVYKGIWI

SEQ ID NO: 354 - protein, 10 aa, Artificial Sequence
  Artificially Synthesized Peptide
GVGSPYVSRL

SEQ ID NO: 355 - protein, 11 aa, Artificial Sequence
  Artificially Synthesized Peptide
GVGSPYVSRLL

SEQ ID NO: 356 - protein, 9 aa, Artificial Sequence
  Artificially Synthesized Peptide
GVKPDLSYM

SEQ ID NO: 357 - protein, 11 aa, Artificial Sequence
  Artificially Synthesized Peptide
GVKPDLSYMPI

SEQ ID NO: 358 - protein, 10 aa, Artificial Sequence
  Artificially Synthesized Peptide
GVLIQRNPQL

SEQ ID NO: 359 - protein, 8 aa, Artificial Sequence
  Artificially Synthesized Peptide
GVTVWELM

SEQ ID NO: 360 - protein, 9 aa, Artificial Sequence
  Artificially Synthesized Peptide
GVTVWELMT

SEQ ID NO: 361 - protein, 8 aa, Artificial Sequence
  Artificially Synthesized Peptide
GVVFGILI

SEQ ID NO: 362 - protein, 8 aa, Artificial Sequence
  Artificially Synthesized Peptide
GVVKDVFA

SEQ ID NO: 363 - protein, 9 aa, Artificial Sequence
  Artificially Synthesized Peptide
HADGGKVPI

SEQ ID NO: 364 - protein, 8 aa, Artificial Sequence
  Artificially Synthesized Peptide
HLCFVHTV

SEQ ID NO: 365 - protein, 8 aa, Artificial Sequence
  Artificially Synthesized Peptide
HLDMLRHL

SEQ ID NO: 366 - protein, 8 aa, Artificial Sequence
  Artificially Synthesized Peptide
HLREVRAV

SEQ ID NO: 367 - protein, 9 aa, Artificial Sequence
  Artificially Synthesized Peptide
HLREVRAVT

SEQ ID NO: 368 - protein, 11 aa, Artificial Sequence
  Artificially Synthesized Peptide
HLREVRAVTSA

SEQ ID NO: 369 - protein, 8 aa, Artificial Sequence
  Artificially Synthesized Peptide
HLYQGCQV

SEQ ID NO: 370 - protein, 9 aa, Artificial Sequence
  Artificially Synthesized Peptide
HLYQGCQVV

SEQ ID NO: 371 - protein, 8 aa, Artificial Sequence
  Artificially Synthesized Peptide
HQALLHTA

SEQ ID NO: 372 - protein, 10 aa, Artificial Sequence
  Artificially Synthesized Peptide
HQSDVWSYGV

SEQ ID NO: 373 - protein, 11 aa, Artificial Sequence
  Artificially Synthesized Peptide
HQSDVWSYGVT

SEQ ID NO: 374 - protein, 11 aa, Artificial Sequence
  Artificially Synthesized Peptide
HTANRPEDECV

SEQ ID NO: 375 - protein, 8 aa, Artificial Sequence
  Artificially Synthesized Peptide
HTVPWDQL

SEQ ID NO: 376 - protein, 9 aa, Artificial Sequence
  Artificially Synthesized Peptide
HVKITDFGL

SEQ ID NO: 377 - protein, 10 aa, Artificial Sequence
  Artificially Synthesized Peptide
HVKITDFGLA

SEQ ID NO: 378 - protein, 9 aa, Artificial Sequence
  Artificially Synthesized Peptide
HVRENRGRL

SEQ ID NO: 379 - protein, 9 aa, Artificial Sequence
  Artificially Synthesized Peptide
IAHNQVRQV

SEQ ID NO: 380 - protein, 11 aa, Artificial Sequence
  Artificially Synthesized Peptide
IAHNQVRQVPL

SEQ ID NO: 381 - protein, 8 aa, Artificial Sequence
  Artificially Synthesized Peptide
IAKGMSYL

SEQ ID NO: 382 - protein, 11 aa, Artificial Sequence
  Artificially Synthesized Peptide
IAKGMSYLEDV

SEQ ID NO: 383 - protein, 8 aa, Artificial Sequence
  Artificially Synthesized Peptide
IISAVVGI

SEQ ID NO: 384 - protein, 9 aa, Artificial Sequence
  Artificially Synthesized Peptide
IISAVVGIL

SEQ ID NO: 385 - protein, 10 aa, Artificial Sequence
  Artificially Synthesized Peptide
IISAVVGILL

SEQ ID NO: 386 - protein, 11 aa, Artificial Sequence
  Artificially Synthesized Peptide
IISAVVGILLV

SEQ ID NO: 387 - protein, 8 aa, Artificial Sequence
  Artificially Synthesized Peptide
ILDEAYVM

SEQ ID NO: 388 - protein, 9 aa, Artificial Sequence
  Artificially Synthesized Peptide
ILDEAYVMA

SEQ ID NO: 389 - protein, 11 aa, Artificial Sequence
  Artificially Synthesized Peptide
ILDEAYVMAGV

SEQ ID NO: 390 - protein, 9 aa, Artificial Sequence
  Artificially Synthesized Peptide
ILHNGAYSL

SEQ ID NO: 391 - protein, 10 aa, Artificial Sequence
  Artificially Synthesized Peptide
ILHNGAYSLT

SEQ ID NO: 392 - protein, 11 aa, Artificial Sequence
  Artificially Synthesized Peptide
ILHNGAYSLTL

SEQ ID NO: 393 - protein, 10 aa, Artificial Sequence
  Artificially Synthesized Peptide
ILIKRRQQKI

SEQ ID NO: 394 - protein, 10 aa, Artificial Sequence
  Artificially Synthesized Peptide
ILKETELRKV

SEQ ID NO: 395 - protein, 8 aa, Artificial Sequence
  Artificially Synthesized Peptide
ILKGGVLI

SEQ ID NO: 396 - protein, 9 aa, Artificial Sequence
  Artificially Synthesized Peptide
ILLVVVLGV

SEQ ID NO: 397 - protein, 10 aa, Artificial Sequence
  Artificially Synthesized Peptide
ILLVVVLGVV

SEQ ID NO: 398 - protein, 8 aa, Artificial Sequence
  Artificially Synthesized Peptide
IMVKCWMI

SEQ ID NO: 399 - protein, 10 aa, Artificial Sequence
  Artificially Synthesized Peptide
IQEFAGCKKI

SEQ ID NO: 400 - protein, 8 aa, Artificial Sequence
  Artificially Synthesized Peptide
IQEVQGYV

SEQ ID NO: 401 - protein, 9 aa, Artificial Sequence
  Artificially Synthesized Peptide
IQEVQGYVL

SEQ ID NO: 402 - protein, 10 aa, Artificial Sequence
  Artificially Synthesized Peptide
IQEVQGYVLI

SEQ ID NO: 403 - protein, 11 aa, Artificial Sequence
  Artificially Synthesized Peptide
IQEVQGYVLIA

SEQ ID NO: 404 - protein, 9 aa, Artificial Sequence
  Artificially Synthesized Peptide
IQNEDLGPA

SEQ ID NO: 405 - protein, 9 aa, Artificial Sequence
  Artificially Synthesized Peptide
ITDFGLARL

SEQ ID NO: 406 - protein, 10 aa, Artificial Sequence
  Artificially Synthesized Peptide
ITDFGLARLL

SEQ ID NO: 407 - protein, 9 aa, Artificial Sequence
  Artificially Synthesized Peptide
ITGYLYISA

SEQ ID NO: 408 - protein, 10 aa, Artificial Sequence
  Artificially Synthesized Peptide
KANKEILDEA

SEQ ID NO: 409 - protein, 9 aa, Artificial Sequence
  Artificially Synthesized Peptide
KIFGSLAFL

SEQ ID NO: 410 - protein, 8 aa, Artificial Sequence
  Artificially Synthesized Peptide
KIPVAIKV

SEQ ID NO: 411 - protein, 9 aa, Artificial Sequence
  Artificially Synthesized Peptide
KIPVAIKVL

SEQ ID NO: 412 - protein, 10 aa, Artificial Sequence
  Artificially Synthesized Peptide
KIRKYTMRRL

SEQ ID NO: 413 - protein, 11 aa, Artificial Sequence
  Artificially Synthesized Peptide
KIRKYTMRRLL

SEQ ID NO: 414 - protein, 8 aa, Artificial Sequence
  Artificially Synthesized Peptide
KITDFGLA

SEQ ID NO: 415 - protein, 10 aa, Artificial Sequence
  Artificially Synthesized Peptide
KITDFGLARL

SEQ ID NO: 416 - protein, 11 aa, Artificial Sequence
  Artificially Synthesized Peptide
KITDFGLARLL

SEQ ID NO: 417 - protein, 10 aa, Artificial Sequence
  Artificially Synthesized Peptide
KLRLPASPET

SEQ ID NO: 418 - protein, 10 aa, Artificial Sequence
  Artificially Synthesized Peptide
KTLSPGKNGV

SEQ ID NO: 419 - protein, 11 aa, Artificial Sequence
  Artificially Synthesized Peptide
KTLSPGKNGVV

SEQ ID NO: 420 - protein, 9 aa, Artificial Sequence
  Artificially Synthesized Peptide
KVKVLGSGA

SEQ ID NO: 421 - protein, 10 aa, Artificial Sequence
  Artificially Synthesized Peptide
KVLGSGAFGT

SEQ ID NO: 422 - protein, 11 aa, Artificial Sequence
  Artificially Synthesized Peptide
KVLGSGAFGTV

SEQ ID NO: 423 - protein, 11 aa, Artificial Sequence
  Artificially Synthesized Peptide
KVLRENTSPKA

SEQ ID NO: 424 - protein, 8 aa, Artificial Sequence
  Artificially Synthesized Peptide
KVPIKWMA

SEQ ID NO: 425 - protein, 9 aa, Artificial Sequence
  Artificially Synthesized Peptide
KVPIKWMAL

SEQ ID NO: 426 - protein, 9 aa, Artificial Sequence
  Artificially Synthesized Peptide
LAALCRWGL

SEQ ID NO: 427 - protein, 10 aa, Artificial Sequence
  Artificially Synthesized Peptide
LAALCRWGLL

SEQ ID NO: 428 - protein, 11 aa, Artificial Sequence
  Artificially Synthesized Peptide
LAALCRWGLLL

SEQ ID NO: 429 - protein, 8 aa, Artificial Sequence
  Artificially Synthesized Peptide
LAARNVLV

SEQ ID NO: 430 - protein, 8 aa, Artificial Sequence
  Artificially Synthesized Peptide
LACHQLCA

SEQ ID NO: 431 - protein, 11 aa, Artificial Sequence
  Artificially Synthesized Peptide
LACLHFNHSGI

SEQ ID NO: 432 - protein, 8 aa, Artificial Sequence
  Artificially Synthesized Peptide
LALIHHNT

SEQ ID NO: 433 - protein, 10 aa, Artificial Sequence
  Artificially Synthesized Peptide
LALIHHNTHL

SEQ ID NO: 434 - protein, 8 aa, Artificial Sequence
  Artificially Synthesized Peptide
LALLPPGA

SEQ ID NO: 435 - protein, 9 aa, Artificial Sequence
  Artificially Synthesized Peptide
LALLPPGAA

SEQ ID NO: 436 - protein, 11 aa, Artificial Sequence
  Artificially Synthesized Peptide
LALLPPGAAST

SEQ ID NO: 437 - protein, 8 aa, Artificial Sequence
  Artificially Synthesized Peptide
LALTLIDT

SEQ ID NO: 438 - protein, 11 aa, Artificial Sequence
  Artificially Synthesized Peptide
LAPSEGAGSDV

SEQ ID NO: 439 - protein, 10 aa, Artificial Sequence
  Artificially Synthesized Peptide
LARLLDIDET

SEQ ID NO: 440 - protein, 10 aa, Artificial Sequence
  Artificially Synthesized Peptide
LAVLDNGDPL

SEQ ID NO: 441 - protein, 10 aa, Artificial Sequence
  Artificially Synthesized Peptide
LIAHNQVRQV

SEQ ID NO: 442 - protein, 9 aa, Artificial Sequence
  Artificially Synthesized Peptide
LIDTNRSRA

SEQ ID NO: 443 - protein, 8 aa, Artificial Sequence
  Artificially Synthesized Peptide
LIHHNTHL

SEQ ID NO: 444 - protein, 11 aa, Artificial Sequence
  Artificially Synthesized Peptide
LIHHNTHLCFV

SEQ ID NO: 445 - protein, 9 aa, Artificial Sequence
  Artificially Synthesized Peptide
LIKRRQQKI

SEQ ID NO: 446 - protein, 8 aa, Artificial Sequence
  Artificially Synthesized Peptide
LIQRNPQL

SEQ ID NO: 447 - protein, 9 aa, Artificial Sequence
  Artificially Synthesized Peptide
LLALLPPGA

SEQ ID NO: 448 - protein, 10 aa, Artificial Sequence
  Artificially Synthesized Peptide
LLALLPPGAA

SEQ ID NO: 449 - protein, 11 aa, Artificial Sequence
  Artificially Synthesized Peptide
LLDIDETEYHA

SEQ ID NO: 450 - protein, 10 aa, Artificial Sequence
  Artificially Synthesized Peptide
LLEDDDMGDL

SEQ ID NO: 451 - protein, 11 aa, Artificial Sequence
  Artificially Synthesized Peptide
LLEDDDMGDLV

SEQ ID NO: 452 - protein, 8 aa, Artificial Sequence
  Artificially Synthesized Peptide
LLEKGERL

SEQ ID NO: 453 - protein, 9 aa, Artificial Sequence
  Artificially Synthesized Peptide
LLGICLTST

SEQ ID NO: 454 - protein, 10 aa, Artificial Sequence
  Artificially Synthesized Peptide
LLGICLTSTV

SEQ ID NO: 455 - protein, 10 aa, Artificial Sequence
  Artificially Synthesized Peptide
LLLALLPPGA

SEQ ID NO: 456 - protein, 11 aa, Artificial Sequence
  Artificially Synthesized Peptide
LLLALLPPGAA

SEQ ID NO: 457 - protein, 8 aa, Artificial Sequence
  Artificially Synthesized Peptide
LLNWCMQI

SEQ ID NO: 458 - protein, 9 aa, Artificial Sequence
  Artificially Synthesized Peptide
LLNWCMQIA

SEQ ID NO: 459 - protein, 9 aa, Artificial Sequence
  Artificially Synthesized Peptide
LLPPGAAST

SEQ ID NO: 460 - protein, 11 aa, Artificial Sequence
  Artificially Synthesized Peptide
LLPPGAASTQV

SEQ ID NO: 461 - protein, 8 aa, Artificial Sequence
  Artificially Synthesized Peptide
LLQETELV

SEQ ID NO: 462 - protein, 11 aa, Artificial Sequence
  Artificially Synthesized Peptide
LLQETELVEPL

SEQ ID NO: 463 - protein, 8 aa, Artificial Sequence
  Artificially Synthesized Peptide
LLVVVLGV

SEQ ID NO: 464 - protein, 9 aa, Artificial Sequence
  Artificially Synthesized Peptide
LLVVVLGVV

SEQ ID NO: 465 - protein, 8 aa, Artificial Sequence
  Artificially Synthesized Peptide
LMPYGCLL

SEQ ID NO: 466 - protein, 11 aa, Artificial Sequence
  Artificially Synthesized Peptide
LMPYGCLLDHV

SEQ ID NO: 467 - protein, 11 aa, Artificial Sequence
  Artificially Synthesized Peptide
LQDIQEVQGYV

SEQ ID NO: 468 - protein, 10 aa, Artificial Sequence
  Artificially Synthesized Peptide
LQETELVEPL

SEQ ID NO: 469 - protein, 11 aa, Artificial Sequence
  Artificially Synthesized Peptide
LQETELVEPLT

SEQ ID NO: 470 - protein, 9 aa, Artificial Sequence
  Artificially Synthesized Peptide
LQGLGISWL

SEQ ID NO: 471 - protein, 11 aa, Artificial Sequence
  Artificially Synthesized Peptide
LQGLGISWLGL

SEQ ID NO: 472 - protein, 9 aa, Artificial Sequence
  Artificially Synthesized Peptide
LQGLPREYV

SEQ ID NO: 473 - protein, 11 aa, Artificial Sequence
  Artificially Synthesized Peptide
LQGLPREYVNA

SEQ ID NO: 474 - protein, 9 aa, Artificial Sequence
  Artificially Synthesized Peptide
LQLRSLTEI

SEQ ID NO: 475 - protein, 10 aa, Artificial Sequence
  Artificially Synthesized Peptide
LQLRSLTEIL

SEQ ID NO: 476 - protein, 8 aa, Artificial Sequence
  Artificially Synthesized Peptide
LQPEQLQV

SEQ ID NO: 477 - protein, 11 aa, Artificial Sequence
  Artificially Synthesized Peptide
LQPEQLQVFET

SEQ ID NO: 478 - protein, 10 aa, Artificial Sequence
  Artificially Synthesized Peptide
LQRLRIVRGT

SEQ ID NO: 479 - protein, 9 aa, Artificial Sequence
  Artificially Synthesized Peptide
LQRYSEDPT

SEQ ID NO: 480 - protein, 10 aa, Artificial Sequence
  Artificially Synthesized Peptide
LQRYSEDPTV

SEQ ID NO: 481 - protein, 10 aa, Artificial Sequence
  Artificially Synthesized Peptide
LQVFETLEEI

SEQ ID NO: 482 - protein, 11 aa, Artificial Sequence
  Artificially Synthesized Peptide
LQVFETLEEIT

SEQ ID NO: 483 - protein, 8 aa, Artificial Sequence
  Artificially Synthesized Peptide
LQVIRGRI

SEQ ID NO: 484 - protein, 9 aa, Artificial Sequence
  Artificially Synthesized Peptide
LQVIRGRIL

SEQ ID NO: 485 - protein, 10 aa, Artificial Sequence
  Artificially Synthesized Peptide
LTCSPQPEYV

SEQ ID NO: 486 - protein, 9 aa, Artificial Sequence
  Artificially Synthesized Peptide
LTEILKGGV

SEQ ID NO: 487 - protein, 10 aa, Artificial Sequence
  Artificially Synthesized Peptide
LTEILKGGVL

SEQ ID NO: 488 - protein, 11 aa, Artificial Sequence
  Artificially Synthesized Peptide
LTEILKGGVLI

SEQ ID NO: 489 - protein, 11 aa, Artificial Sequence
  Artificially Synthesized Peptide
LTLIDTNRSRA

SEQ ID NO: 490 - protein, 8 aa, Artificial Sequence
  Artificially Synthesized Peptide
LTLQGLGI

SEQ ID NO: 491 - protein, 11 aa, Artificial Sequence
  Artificially Synthesized Peptide
LTLQGLGISWL

SEQ ID NO: 492 - protein, 8 aa, Artificial Sequence
  Artificially Synthesized Peptide
LTPQGGAA

SEQ ID NO: 493 - protein, 11 aa, Artificial Sequence
  Artificially Synthesized Peptide
LTPSGAMPNQA

SEQ ID NO: 494 - protein, 11 aa, Artificial Sequence
  Artificially Synthesized Peptide
LTRTVCAGGCA

SEQ ID NO: 495 - protein, 8 aa, Artificial Sequence
  Artificially Synthesized Peptide
LTSIISAV

SEQ ID NO: 496 - protein, 9 aa, Artificial Sequence
  Artificially Synthesized Peptide
LTSIISAVV

SEQ ID NO: 497 - protein, 11 aa, Artificial Sequence
  Artificially Synthesized Peptide
LTSIISAVVGI

SEQ ID NO: 498 - protein, 8 aa, Artificial Sequence
  Artificially Synthesized Peptide
LTSTVQLV

SEQ ID NO: 499 - protein, 9 aa, Artificial Sequence
  Artificially Synthesized Peptide
LTSTVQLVT

SEQ ID NO: 500 - protein, 11 aa, Artificial Sequence
  Artificially Synthesized Peptide
LTSTVQLVTQL

SEQ ID NO: 501 - protein, 8 aa, Artificial Sequence
  Artificially Synthesized Peptide
LTYLPTNA

SEQ ID NO: 502 - protein, 10 aa, Artificial Sequence
  Artificially Synthesized Peptide
LTYLPTNASL

SEQ ID NO: 503 - protein, 10 aa, Artificial Sequence
  Artificially Synthesized Peptide
LVCPLHNQEV

SEQ ID NO: 504 - protein, 11 aa, Artificial Sequence
  Artificially Synthesized Peptide
LVCPLHNQEVT

SEQ ID NO: 505 - protein, 8 aa, Artificial Sequence
  Artificially Synthesized Peptide
LVDAEEYL

SEQ ID NO: 506 - protein, 9 aa, Artificial Sequence
  Artificially Synthesized Peptide
LVDAEEYLV

SEQ ID NO: 507 - protein, 10 aa, Artificial Sequence
  Artificially Synthesized Peptide
LVEPLTPSGA

SEQ ID NO: 508 - protein, 11 aa, Artificial Sequence
  Artificially Synthesized Peptide
LVEPLTPSGAM

SEQ ID NO: 509 - protein, 8 aa, Artificial Sequence
  Artificially Synthesized Peptide
LVHRDLAA

SEQ ID NO: 510 - protein, 11 aa, Artificial Sequence
  Artificially Synthesized Peptide
LVHRDLAARNV

SEQ ID NO: 511 - protein, 8 aa, Artificial Sequence
  Artificially Synthesized Peptide
LVKSPNHV

SEQ ID NO: 512 - protein, 10 aa, Artificial Sequence
  Artificially Synthesized Peptide
LVKSPNHVKI

SEQ ID NO: 513 - protein, 11 aa, Artificial Sequence
  Artificially Synthesized Peptide
LVKSPNHVKIT

SEQ ID NO: 514 - protein, 8 aa, Artificial Sequence
  Artificially Synthesized Peptide
LVSEFSRM

SEQ ID NO: 515 - protein, 9 aa, Artificial Sequence
  Artificially Synthesized Peptide
LVSEFSRMA

SEQ ID NO: 516 - protein, 11 aa, Artificial Sequence
  Artificially Synthesized Peptide
LVTQLMPYGCL

SEQ ID NO: 517 - protein, 8 aa, Artificial Sequence
  Artificially Synthesized Peptide
LVTYNTDT

SEQ ID NO: 518 - protein, 8 aa, Artificial Sequence
  Artificially Synthesized Peptide
LVVVLGVV

SEQ ID NO: 519 - protein, 11 aa, Artificial Sequence
  Artificially Synthesized Peptide
LVVVLGVVFGI

SEQ ID NO: 520 - protein, 9 aa, Artificial Sequence
  Artificially Synthesized Peptide
MAGVGSPYV

SEQ ID NO: 521 - protein, 9 aa, Artificial Sequence
  Artificially Synthesized Peptide
MARDPQRFV

SEQ ID NO: 522 - protein, 10 aa, Artificial Sequence
  Artificially Synthesized Peptide
MARDPQRFVV

SEQ ID NO: 523 - protein, 11 aa, Artificial Sequence
  Artificially Synthesized Peptide
MARDPQRFVVI

SEQ ID NO: 524 - protein, 8 aa, Artificial Sequence
  Artificially Synthesized Peptide
MIMVKCWM

SEQ ID NO: 525 - protein, 9 aa, Artificial Sequence
  Artificially Synthesized Peptide
MIMVKCWMI

SEQ ID NO: 526 - protein, 11 aa, Artificial Sequence
  Artificially Synthesized Peptide
MLRHLYQGCQV

SEQ ID NO: 527 - protein, 10 aa, Artificial Sequence
  Artificially Synthesized Peptide
MQIAKGMSYL

SEQ ID NO: 528 - protein, 11 aa, Artificial Sequence
  Artificially Synthesized Peptide
MTFGAKPYDGI

SEQ ID NO: 529 - protein, 11 aa, Artificial Sequence
  Artificially Synthesized Peptide
MVHHRHRSSST

SEQ ID NO: 530 - protein, 10 aa, Artificial Sequence
  Artificially Synthesized Peptide
NASLSFLQDI

SEQ ID NO: 531 - protein, 11 aa, Artificial Sequence
  Artificially Synthesized Peptide
NIQEFAGCKKI

SEQ ID NO: 532 - protein, 9 aa, Artificial Sequence
  Artificially Synthesized Peptide
NLELTYLPT

SEQ ID NO: 533 - protein, 11 aa, Artificial Sequence
  Artificially Synthesized Peptide
NLELTYLPTNA

SEQ ID NO: 534 - protein, 9 aa, Artificial Sequence
  Artificially Synthesized Peptide
NLQVIRGRI

SEQ ID NO: 535 - protein, 10 aa, Artificial Sequence
  Artificially Synthesized Peptide
NLQVIRGRIL

SEQ ID NO: 536 - protein, 8 aa, Artificial Sequence
  Artificially Synthesized Peptide
NQAQMRIL

SEQ ID NO: 537 - protein, 11 aa, Artificial Sequence
  Artificially Synthesized Peptide
NQAQMRILKET

SEQ ID NO: 538 - protein, 10 aa, Artificial Sequence
  Artificially Synthesized Peptide
NQEVTAEDGT

SEQ ID NO: 539 - protein, 8 aa, Artificial Sequence
  Artificially Synthesized Peptide
NQLALTLI

SEQ ID NO: 540 - protein, 10 aa, Artificial Sequence
  Artificially Synthesized Peptide
NQLALTLIDT

SEQ ID NO: 541 - protein, 8 aa, Artificial Sequence
  Artificially Synthesized Peptide
NQVRQVPL

SEQ ID NO: 542 - protein, 11 aa, Artificial Sequence
  Artificially Synthesized Peptide
NQVRQVPLQRL

SEQ ID NO: 543 - protein, 10 aa, Artificial Sequence
  Artificially Synthesized Peptide
NTAPLQPEQL

SEQ ID NO: 544 - protein, 8 aa, Artificial Sequence
  Artificially Synthesized Peptide
NTDTFESM

SEQ ID NO: 545 - protein, 9 aa, Artificial Sequence
  Artificially Synthesized Peptide
NTHLCFVHT

SEQ ID NO: 546 - protein, 10 aa, Artificial Sequence
  Artificially Synthesized Peptide
NTHLCFVHTV

SEQ ID NO: 547 - protein, 10 aa, Artificial Sequence
  Artificially Synthesized Peptide
NTSPKANKEI

SEQ ID NO: 548 - protein, 11 aa, Artificial Sequence
  Artificially Synthesized Peptide
NTSPKANKEIL

SEQ ID NO: 549 - protein, 8 aa, Artificial Sequence
  Artificially Synthesized Peptide
NTTPVTGA

SEQ ID NO: 550 - protein, 8 aa, Artificial Sequence
  Artificially Synthesized Peptide
NVKIPVAI

SEQ ID NO: 551 - protein, 10 aa, Artificial Sequence
  Artificially Synthesized Peptide
NVKIPVAIKV

SEQ ID NO: 552 - protein, 11 aa, Artificial Sequence
  Artificially Synthesized Peptide
NVKIPVAIKVL

SEQ ID NO: 553 - protein, 10 aa, Artificial Sequence
  Artificially Synthesized Peptide
NVLVKSPNHV

SEQ ID NO: 554 - protein, 8 aa, Artificial Sequence
  Artificially Synthesized Peptide
PAARPAGA

SEQ ID NO: 555 - protein, 9 aa, Artificial Sequence
  Artificially Synthesized Peptide
PAARPAGAT

SEQ ID NO: 556 - protein, 10 aa, Artificial Sequence
  Artificially Synthesized Peptide
PAARPAGATL

SEQ ID NO: 557 - protein, 9 aa, Artificial Sequence
  Artificially Synthesized Peptide
PAEQRASPL

SEQ ID NO: 558 - protein, 10 aa, Artificial Sequence
  Artificially Synthesized Peptide
PAEQRASPLT

SEQ ID NO: 559 - protein, 10 aa, Artificial Sequence
  Artificially Synthesized Peptide
PAFSPAFDNL

SEQ ID NO: 560 - protein, 11 aa, Artificial Sequence
  Artificially Synthesized Peptide
PAGATLERPKT

SEQ ID NO: 561 - protein, 8 aa, Artificial Sequence
  Artificially Synthesized Peptide
PALVTYNT

SEQ ID NO: 562 - protein, 10 aa, Artificial Sequence
  Artificially Synthesized Peptide
PALVTYNTDT

SEQ ID NO: 563 - protein, 8 aa, Artificial Sequence
  Artificially Synthesized Peptide
PAPGAGGM

SEQ ID NO: 564 - protein, 9 aa, Artificial Sequence
  Artificially Synthesized Peptide
PAPGAGGMV

SEQ ID NO: 565 - protein, 8 aa, Artificial Sequence
  Artificially Synthesized Peptide
PAREIPDL

SEQ ID NO: 566 - protein, 9 aa, Artificial Sequence
  Artificially Synthesized Peptide
PAREIPDLL

SEQ ID NO: 567 - protein, 8 aa, Artificial Sequence
  Artificially Synthesized Peptide
PASNTAPL

SEQ ID NO: 568 - protein, 8 aa, Artificial Sequence
  Artificially Synthesized Peptide
PASPETHL

SEQ ID NO: 569 - protein, 10 aa, Artificial Sequence
  Artificially Synthesized Peptide
PASPETHLDM

SEQ ID NO: 570 - protein, 11 aa, Artificial Sequence
  Artificially Synthesized Peptide
PASPETHLDML

SEQ ID NO: 571 - protein, 8 aa, Artificial Sequence
  Artificially Synthesized Peptide
PASPLDST

SEQ ID NO: 572 - protein, 9 aa, Artificial Sequence
  Artificially Synthesized Peptide
PICTIDVYM

SEQ ID NO: 573 - protein, 10 aa, Artificial Sequence
  Artificially Synthesized Peptide
PICTIDVYMI

SEQ ID NO: 574 - protein, 11 aa, Artificial Sequence
  Artificially Synthesized Peptide
PICTIDVYMIM

SEQ ID NO: 575 - protein, 10 aa, Artificial Sequence
  Artificially Synthesized Peptide
PIKWMALESI

SEQ ID NO: 576 - protein, 11 aa, Artificial Sequence
  Artificially Synthesized Peptide
PIKWMALESIL

SEQ ID NO: 577 - protein, 9 aa, Artificial Sequence
  Artificially Synthesized Peptide
PINCTHSCV

SEQ ID NO: 578 - protein, 11 aa, Artificial Sequence
  Artificially Synthesized Peptide
PINCTHSCVDL

SEQ ID NO: 579 - protein, 11 aa, Artificial Sequence
  Artificially Synthesized Peptide
PIWKFPDEEGA

SEQ ID NO: 580 - protein, 8 aa, Artificial Sequence
  Artificially Synthesized Peptide
PLAPSEGA

SEQ ID NO: 581 - protein, 10 aa, Artificial Sequence
  Artificially Synthesized Peptide
PLDSTFYRSL

SEQ ID NO: 582 - protein, 11 aa, Artificial Sequence
  Artificially Synthesized Peptide
PLDSTFYRSLL

SEQ ID NO: 583 - protein, 8 aa, Artificial Sequence
  Artificially Synthesized Peptide
PLHNQEVT

SEQ ID NO: 584 - protein, 9 aa, Artificial Sequence
  Artificially Synthesized Peptide
PLHNQEVTA

SEQ ID NO: 585 - protein, 8 aa, Artificial Sequence
  Artificially Synthesized Peptide
PLNNTTPV

SEQ ID NO: 586 - protein, 9 aa, Artificial Sequence
  Artificially Synthesized Peptide
PLNNTTPVT

SEQ ID NO: 587 - protein, 11 aa, Artificial Sequence
  Artificially Synthesized Peptide
PLNNTTPVTGA

SEQ ID NO: 588 - protein, 8 aa, Artificial Sequence
  Artificially Synthesized Peptide
PLPAARPA

SEQ ID NO: 589 - protein, 10 aa, Artificial Sequence
  Artificially Synthesized Peptide
PLPAARPAGA

SEQ ID NO: 590 - protein, 11 aa, Artificial Sequence
  Artificially Synthesized Peptide
PLPAARPAGAT

SEQ ID NO: 591 - protein, 10 aa, Artificial Sequence
  Artificially Synthesized Peptide
PLPSETDGYV

SEQ ID NO: 592 - protein, 11 aa, Artificial Sequence
  Artificially Synthesized Peptide
PLPSETDGYVA

SEQ ID NO: 593 - protein, 9 aa, Artificial Sequence
  Artificially Synthesized Peptide
PLQPEQLQV

SEQ ID NO: 594 - protein, 8 aa, Artificial Sequence
  Artificially Synthesized Peptide
PLQRLRIV

SEQ ID NO: 595 - protein, 11 aa, Artificial Sequence
  Artificially Synthesized Peptide
PLQRLRIVRGT

SEQ ID NO: 596 - protein, 10 aa, Artificial Sequence
  Artificially Synthesized Peptide
PLQRYSEDPT

SEQ ID NO: 597 - protein, 11 aa, Artificial Sequence
  Artificially Synthesized Peptide
PLQRYSEDPTV

SEQ ID NO: 598 - protein, 11 aa, Artificial Sequence
  Artificially Synthesized Peptide
PLTCSPQPEYV

SEQ ID NO: 599 - protein, 8 aa, Artificial Sequence
  Artificially Synthesized Peptide
PLTPSGAM

SEQ ID NO: 600 - protein, 8 aa, Artificial Sequence
  Artificially Synthesized Peptide
PLTSIISA

SEQ ID NO: 601 - protein, 9 aa, Artificial Sequence
  Artificially Synthesized Peptide
PLTSIISAV

SEQ ID NO: 602 - protein, 10 aa, Artificial Sequence
  Artificially Synthesized Peptide
PLTSIISAVV

SEQ ID NO: 603 - protein, 8 aa, Artificial Sequence
  Artificially Synthesized Peptide
PQLCYQDT

SEQ ID NO: 604 - protein, 9 aa, Artificial Sequence
  Artificially Synthesized Peptide
PQLCYQDTI

SEQ ID NO: 605 - protein, 10 aa, Artificial Sequence
  Artificially Synthesized Peptide
PQLCYQDTIL

SEQ ID NO: 606 - protein, 11 aa, Artificial Sequence
  Artificially Synthesized Peptide
PQPEYVNQPDV

SEQ ID NO: 607 - protein, 8 aa, Artificial Sequence
  Artificially Synthesized Peptide
PQPHPPPA

SEQ ID NO: 608 - protein, 8 aa, Artificial Sequence
  Artificially Synthesized Peptide
PQPPICTI

SEQ ID NO: 609 - protein, 10 aa, Artificial Sequence
  Artificially Synthesized Peptide
PQPPICTIDV

SEQ ID NO: 610 - protein, 11 aa, Artificial Sequence
  Artificially Synthesized Peptide
PQPPSPREGPL

SEQ ID NO: 611 - protein, 11 aa, Artificial Sequence
  Artificially Synthesized Peptide
PQQGFFCPDPA

SEQ ID NO: 612 - protein, 9 aa, Artificial Sequence
  Artificially Synthesized Peptide
PTAENPEYL

SEQ ID NO: 613 - protein, 11 aa, Artificial Sequence
  Artificially Synthesized Peptide
PTAENPEYLGL

SEQ ID NO: 614 - protein, 10 aa, Artificial Sequence
  Artificially Synthesized Peptide
PTDCCHEQCA

SEQ ID NO: 615 - protein, 11 aa, Artificial Sequence
  Artificially Synthesized Peptide
PTDCCHEQCAA

SEQ ID NO: 616 - protein, 8 aa, Artificial Sequence
  Artificially Synthesized Peptide
PTHDPSPL

SEQ ID NO: 617 - protein, 9 aa, Artificial Sequence
  Artificially Synthesized Peptide
PTNASLSFL

SEQ ID NO: 618 - protein, 11 aa, Artificial Sequence
  Artificially Synthesized Peptide
PTQCVNCSQFL

SEQ ID NO: 619 - protein, 9 aa, Artificial Sequence
  Artificially Synthesized Peptide
PTVPLPSET

SEQ ID NO: 620 - protein, 11 aa, Artificial Sequence
  Artificially Synthesized Peptide
PVAIKVLRENT

SEQ ID NO: 621 - protein, 10 aa, Artificial Sequence
  Artificially Synthesized Peptide
PVTGASPGGL

SEQ ID NO: 622 - protein, 10 aa, Artificial Sequence
  Artificially Synthesized Peptide
QAQMRILKET

SEQ ID NO: 623 - protein, 9 aa, Artificial Sequence
  Artificially Synthesized Peptide
QIAKGMSYL

SEQ ID NO: 624 - protein, 9 aa, Artificial Sequence
  Artificially Synthesized Peptide
QLALTLIDT

SEQ ID NO: 625 - protein, 8 aa, Artificial Sequence
  Artificially Synthesized Peptide
QLCYQDTI

SEQ ID NO: 626 - protein, 9 aa, Artificial Sequence
  Artificially Synthesized Peptide
QLCYQDTIL

SEQ ID NO: 627 - protein, 8 aa, Artificial Sequence
  Artificially Synthesized Peptide
QLFEDNYA

SEQ ID NO: 628 - protein, 9 aa, Artificial Sequence
  Artificially Synthesized Peptide
QLFEDNYAL

SEQ ID NO: 629 - protein, 10 aa, Artificial Sequence
  Artificially Synthesized Peptide
QLFEDNYALA

SEQ ID NO: 630 - protein, 11 aa, Artificial Sequence
  Artificially Synthesized Peptide
QLFEDNYALAV

SEQ ID NO: 631 - protein, 9 aa, Artificial Sequence
  Artificially Synthesized Peptide
QLFRNPHQA

SEQ ID NO: 632 - protein, 10 aa, Artificial Sequence
  Artificially Synthesized Peptide
QLFRNPHQAL

SEQ ID NO: 633 - protein, 11 aa, Artificial Sequence
  Artificially Synthesized Peptide
QLFRNPHQALL

SEQ ID NO: 634 - protein, 8 aa, Artificial Sequence
  Artificially Synthesized Peptide
QLMPYGCL

SEQ ID NO: 635 - protein, 9 aa, Artificial Sequence
  Artificially Synthesized Peptide
QLMPYGCLL

SEQ ID NO: 636 - protein, 8 aa, Artificial Sequence
  Artificially Synthesized Peptide
QLQVFETL

SEQ ID NO: 637 - protein, 11 aa, Artificial Sequence
  Artificially Synthesized Peptide
QLQVFETLEEI

SEQ ID NO: 638 - protein, 8 aa, Artificial Sequence
  Artificially Synthesized Peptide
QLRSLTEI

SEQ ID NO: 639 - protein, 9 aa, Artificial Sequence
  Artificially Synthesized Peptide
QLRSLTEIL

SEQ ID NO: 640 - protein, 8 aa, Artificial Sequence
  Artificially Synthesized Peptide
QMRILKET

SEQ ID NO: 641 - protein, 10 aa, Artificial Sequence
  Artificially Synthesized Peptide
QMRILKETEL

SEQ ID NO: 642 - protein, 10 aa, Artificial Sequence
  Artificially Synthesized Peptide
QQGFFCPDPA

SEQ ID NO: 643 - protein, 8 aa, Artificial Sequence
  Artificially Synthesized Peptide
QQKIRKYT

SEQ ID NO: 644 - protein, 9 aa, Artificial Sequence
  Artificially Synthesized Peptide
QQKIRKYTM

SEQ ID NO: 645 - protein, 8 aa, Artificial Sequence
  Artificially Synthesized Peptide
QVCTGTDM

SEQ ID NO: 646 - protein, 10 aa, Artificial Sequence
  Artificially Synthesized Peptide
QVCTGTDMKL

SEQ ID NO: 647 - protein, 9 aa, Artificial Sequence
  Artificially Synthesized Peptide
QVFETLEEI

SEQ ID NO: 648 - protein, 10 aa, Artificial Sequence
  Artificially Synthesized Peptide
QVFETLEEIT

SEQ ID NO: 649 - protein, 8 aa, Artificial Sequence
  Artificially Synthesized Peptide
QVIRGRIL

SEQ ID NO: 650 - protein, 9 aa, Artificial Sequence
  Artificially Synthesized Peptide
QVPLQRLRI

SEQ ID NO: 651 - protein, 10 aa, Artificial Sequence
  Artificially Synthesized Peptide
QVPLQRLRIV

SEQ ID NO: 652 - protein, 10 aa, Artificial Sequence
  Artificially Synthesized Peptide
QVRQVPLQRL

SEQ ID NO: 653 - protein, 9 aa, Artificial Sequence
  Artificially Synthesized Peptide
QVVQGNLEL

SEQ ID NO: 654 - protein, 10 aa, Artificial Sequence
  Artificially Synthesized Peptide
QVVQGNLELT

SEQ ID NO: 655 - protein, 9 aa, Artificial Sequence
  Artificially Synthesized Peptide
RACHPCSPM

SEQ ID NO: 656 - protein, 8 aa, Artificial Sequence
  Artificially Synthesized Peptide
RASPLTSI

SEQ ID NO: 657 - protein, 9 aa, Artificial Sequence
  Artificially Synthesized Peptide
RASPLTSII

SEQ ID NO: 658 - protein, 11 aa, Artificial Sequence
  Artificially Synthesized Peptide
RASPLTSIISA

SEQ ID NO: 659 - protein, 8 aa, Artificial Sequence
  Artificially Synthesized Peptide
RAVTSANI

SEQ ID NO: 660 - protein, 10 aa, Artificial Sequence
  Artificially Synthesized Peptide
RILHNGAYSL

SEQ ID NO: 661 - protein, 11 aa, Artificial Sequence
  Artificially Synthesized Peptide
RILHNGAYSLT

SEQ ID NO: 662 - protein, 8 aa, Artificial Sequence
  Artificially Synthesized Peptide
RILKETEL

SEQ ID NO: 663 - protein, 11 aa, Artificial Sequence
  Artificially Synthesized Peptide
RILKETELRKV

SEQ ID NO: 664 - protein, 8 aa, Artificial Sequence
  Artificially Synthesized Peptide
RIVRGTQL

SEQ ID NO: 665 - protein, 8 aa, Artificial Sequence
  Artificially Synthesized Peptide
RLGSQDLL

SEQ ID NO: 666 - protein, 8 aa, Artificial Sequence
  Artificially Synthesized Peptide
RLLDIDET

SEQ ID NO: 667 - protein, 8 aa, Artificial Sequence
  Artificially Synthesized Peptide
RLLGICLT

SEQ ID NO: 668 - protein, 10 aa, Artificial Sequence
  Artificially Synthesized Peptide
RLLGICLTST

SEQ ID NO: 669 - protein, 11 aa, Artificial Sequence
  Artificially Synthesized Peptide
RLLGICLTSTV

SEQ ID NO: 670 - protein, 8 aa, Artificial Sequence
  Artificially Synthesized Peptide
RLLQETEL

SEQ ID NO: 671 - protein, 9 aa, Artificial Sequence
  Artificially Synthesized Peptide
RLLQETELV

SEQ ID NO: 672 - protein, 8 aa, Artificial Sequence
  Artificially Synthesized Peptide
RLPASPET

SEQ ID NO: 673 - protein, 10 aa, Artificial Sequence
  Artificially Synthesized Peptide
RLPASPETHL

SEQ ID NO: 674 - protein, 9 aa, Artificial Sequence
  Artificially Synthesized Peptide
RLPQPPICT

SEQ ID NO: 675 - protein, 10 aa, Artificial Sequence
  Artificially Synthesized Peptide
RLPQPPICTI

SEQ ID NO: 676 - protein, 8 aa, Artificial Sequence
  Artificially Synthesized Peptide
RLRIVRGT

SEQ ID NO: 677 - protein, 10 aa, Artificial Sequence
  Artificially Synthesized Peptide
RLRIVRGTQL

SEQ ID NO: 678 - protein, 8 aa, Artificial Sequence
  Artificially Synthesized Peptide
RLVHRDLA

SEQ ID NO: 679 - protein, 9 aa, Artificial Sequence
  Artificially Synthesized Peptide
RLVHRDLAA

SEQ ID NO: 680 - protein, 10 aa, Artificial Sequence
  Artificially Synthesized Peptide
RMARDPQRFV

SEQ ID NO: 681 - protein, 11 aa, Artificial Sequence
  Artificially Synthesized Peptide
RMARDPQRFVV

SEQ ID NO: 682 - protein, 9 aa, Artificial Sequence
  Artificially Synthesized Peptide
RQQKIRKYT

SEQ ID NO: 683 - protein, 10 aa, Artificial Sequence
  Artificially Synthesized Peptide
RQQKIRKYTM

SEQ ID NO: 684 - protein, 8 aa, Artificial Sequence
  Artificially Synthesized Peptide
RQVPLQRL

SEQ ID NO: 685 - protein, 10 aa, Artificial Sequence
  Artificially Synthesized Peptide
RQVPLQRLRI

SEQ ID NO: 686 - protein, 11 aa, Artificial Sequence
  Artificially Synthesized Peptide
RQVPLQRLRIV

SEQ ID NO: 687 - protein, 9 aa, Artificial Sequence
  Artificially Synthesized Peptide
RTVCAGGCA

SEQ ID NO: 688 - protein, 8 aa, Artificial Sequence
  Artificially Synthesized Peptide
RVCYGLGM

SEQ ID NO: 689 - protein, 11 aa, Artificial Sequence
  Artificially Synthesized Peptide
RVCYGLGMEHL

SEQ ID NO: 690 - protein, 11 aa, Artificial Sequence
  Artificially Synthesized Peptide
RVLQGLPREYV

SEQ ID NO: 691 - protein, 8 aa, Artificial Sequence
  Artificially Synthesized Peptide
SANIQEFA

SEQ ID NO: 692 - protein, 8 aa, Artificial Sequence
  Artificially Synthesized Peptide
SAVVGILL

SEQ ID NO: 693 - protein, 9 aa, Artificial Sequence
  Artificially Synthesized Peptide
SAVVGILLV

SEQ ID NO: 694 - protein, 10 aa, Artificial Sequence
  Artificially Synthesized Peptide
SAVVGILLVV

SEQ ID NO: 695 - protein, 11 aa, Artificial Sequence
  Artificially Synthesized Peptide
SAVVGILLVVV

SEQ ID NO: 696 - protein, 10 aa, Artificial Sequence
  Artificially Synthesized Peptide
SAWPDSLPDL

SEQ ID NO: 697 - protein, 9 aa, Artificial Sequence
  Artificially Synthesized Peptide
SIISAVVGI

SEQ ID NO: 698 - protein, 10 aa, Artificial Sequence
  Artificially Synthesized Peptide
SIISAVVGIL

SEQ ID NO: 699 - protein, 11 aa, Artificial Sequence
  Artificially Synthesized Peptide
SIISAVVGILL

SEQ ID NO: 700 - protein, 8 aa, Artificial Sequence
  Artificially Synthesized Peptide
SILRRRFT

SEQ ID NO: 701 - protein, 8 aa, Artificial Sequence
  Artificially Synthesized Peptide
SLLEDDDM

SEQ ID NO: 702 - protein, 11 aa, Artificial Sequence
  Artificially Synthesized Peptide
SLLEDDDMGDL

SEQ ID NO: 703 - protein, 11 aa, Artificial Sequence
  Artificially Synthesized Peptide
SLPDLSVFQNL

SEQ ID NO: 704 - protein, 10 aa, Artificial Sequence
  Artificially Synthesized Peptide
SLPTHDPSPL

SEQ ID NO: 705 - protein, 9 aa, Artificial Sequence
  Artificially Synthesized Peptide
SLRELGSGL

SEQ ID NO: 706 - protein, 10 aa, Artificial Sequence
  Artificially Synthesized Peptide
SLRELGSGLA

SEQ ID NO: 707 - protein, 11 aa, Artificial Sequence
  Artificially Synthesized Peptide
SLRELGSGLAL

SEQ ID NO: 708 - protein, 8 aa, Artificial Sequence
  Artificially Synthesized Peptide
SLSFLQDI

SEQ ID NO: 709 - protein, 11 aa, Artificial Sequence
  Artificially Synthesized Peptide
SLSFLQDIQEV

SEQ ID NO: 710 - protein, 10 aa, Artificial Sequence
  Artificially Synthesized Peptide
SLTEILKGGV

SEQ ID NO: 711 - protein, 11 aa, Artificial Sequence
  Artificially Synthesized Peptide
SLTEILKGGVL

SEQ ID NO: 712 - protein, 9 aa, Artificial Sequence
  Artificially Synthesized Peptide
SLTLQGLGI

SEQ ID NO: 713 - protein, 8 aa, Artificial Sequence
  Artificially Synthesized Peptide
SLTRTVCA

SEQ ID NO: 714 - protein, 10 aa, Artificial Sequence
  Artificially Synthesized Peptide
SMPNPEGRYT

SEQ ID NO: 715 - protein, 9 aa, Artificial Sequence
  Artificially Synthesized Peptide
SQDLLNWCM

SEQ ID NO: 716 - protein, 11 aa, Artificial Sequence
  Artificially Synthesized Peptide
SQDLLNWCMQI

SEQ ID NO: 717 - protein, 10 aa, Artificial Sequence
  Artificially Synthesized Peptide
SQFLRGQECV

SEQ ID NO: 718 - protein, 8 aa, Artificial Sequence
  Artificially Synthesized Peptide
STDVGSCT

SEQ ID NO: 719 - protein, 9 aa, Artificial Sequence
  Artificially Synthesized Peptide
STDVGSCTL

SEQ ID NO: 720 - protein, 10 aa, Artificial Sequence
  Artificially Synthesized Peptide
STDVGSCTLV

SEQ ID NO: 721 - protein, 8 aa, Artificial Sequence
  Artificially Synthesized Peptide
STFKGTPT

SEQ ID NO: 722 - protein, 9 aa, Artificial Sequence
  Artificially Synthesized Peptide
STFKGTPTA

SEQ ID NO: 723 - protein, 8 aa, Artificial Sequence
  Artificially Synthesized Peptide
STFYRSLL

SEQ ID NO: 724 - protein, 8 aa, Artificial Sequence
  Artificially Synthesized Peptide
STQVCTGT

SEQ ID NO: 725 - protein, 10 aa, Artificial Sequence
  Artificially Synthesized Peptide
STQVCTGTDM

SEQ ID NO: 726 - protein, 9 aa, Artificial Sequence
  Artificially Synthesized Peptide
STRSGGGDL

SEQ ID NO: 727 - protein, 10 aa, Artificial Sequence
  Artificially Synthesized Peptide
STRSGGGDLT

SEQ ID NO: 728 - protein, 11 aa, Artificial Sequence
  Artificially Synthesized Peptide
STRSGGGDLTL

SEQ ID NO: 729 - protein, 9 aa, Artificial Sequence
  Artificially Synthesized Peptide
STVQLVTQL

SEQ ID NO: 730 - protein, 10 aa, Artificial Sequence
  Artificially Synthesized Peptide
STVQLVTQLM

SEQ ID NO: 731 - protein, 8 aa, Artificial Sequence
  Artificially Synthesized Peptide
SVFQNLQV

SEQ ID NO: 732 - protein, 9 aa, Artificial Sequence
  Artificially Synthesized Peptide
SVFQNLQVI

SEQ ID NO: 733 - protein, 9 aa, Artificial Sequence
  Artificially Synthesized Peptide
SVTCFGPEA

SEQ ID NO: 734 - protein, 8 aa, Artificial Sequence
  Artificially Synthesized Peptide
TACPYNYL

SEQ ID NO: 735 - protein, 10 aa, Artificial Sequence
  Artificially Synthesized Peptide
TACPYNYLST

SEQ ID NO: 736 - protein, 8 aa, Artificial Sequence
  Artificially Synthesized Peptide
TAENPEYL

SEQ ID NO: 737 - protein, 10 aa, Artificial Sequence
  Artificially Synthesized Peptide
TAENPEYLGL

SEQ ID NO: 738 - protein, 10 aa, Artificial Sequence
  Artificially Synthesized Peptide
TANRPEDECV

SEQ ID NO: 739 - protein, 9 aa, Artificial Sequence
  Artificially Synthesized Peptide
TAPLQPEQL

SEQ ID NO: 740 - protein, 11 aa, Artificial Sequence
  Artificially Synthesized Peptide
TAPLQPEQLQV

SEQ ID NO: 741 - protein, 8 aa, Artificial Sequence
  Artificially Synthesized Peptide
TIDVYMIM

SEQ ID NO: 742 - protein, 9 aa, Artificial Sequence
  Artificially Synthesized Peptide
TIDVYMIMV

SEQ ID NO: 743 - protein, 9 aa, Artificial Sequence
  Artificially Synthesized Peptide
TLEEITGYL

SEQ ID NO: 744 - protein, 11 aa, Artificial Sequence
  Artificially Synthesized Peptide
TLEEITGYLYI

SEQ ID NO: 745 - protein, 8 aa, Artificial Sequence
  Artificially Synthesized Peptide
TLERPKTL

SEQ ID NO: 746 - protein, 11 aa, Artificial Sequence
  Artificially Synthesized Peptide
TLGLEPSEEEA

SEQ ID NO: 747 - protein, 10 aa, Artificial Sequence
  Artificially Synthesized Peptide
TLIDTNRSRA

SEQ ID NO: 748 - protein, 10 aa, Artificial Sequence
  Artificially Synthesized Peptide
TLQGLGISWL

SEQ ID NO: 749 - protein, 9 aa, Artificial Sequence
  Artificially Synthesized Peptide
TLSPGKNGV

SEQ ID NO: 750 - protein, 10 aa, Artificial Sequence
  Artificially Synthesized Peptide
TLSPGKNGVV

SEQ ID NO: 751 - protein, 11 aa, Artificial Sequence
  Artificially Synthesized Peptide
TLVCPLHNQEV

SEQ ID NO: 752 - protein, 9 aa, Artificial Sequence
  Artificially Synthesized Peptide
TMRRLLQET

SEQ ID NO: 753 - protein, 11 aa, Artificial Sequence
  Artificially Synthesized Peptide
TMRRLLQETEL

SEQ ID NO: 754 - protein, 10 aa, Artificial Sequence
  Artificially Synthesized Peptide
TQCVNCSQFL

SEQ ID NO: 755 - protein, 9 aa, Artificial Sequence
  Artificially Synthesized Peptide
TQLFEDNYA

SEQ ID NO: 756 - protein, 10 aa, Artificial Sequence
  Artificially Synthesized Peptide
TQLFEDNYAL

SEQ ID NO: 757 - protein, 11 aa, Artificial Sequence
  Artificially Synthesized Peptide
TQLFEDNYALA

SEQ ID NO: 758 - protein, 9 aa, Artificial Sequence
  Artificially Synthesized Peptide
TQLMPYGCL

SEQ ID NO: 759 - protein, 10 aa, Artificial Sequence
  Artificially Synthesized Peptide
TQLMPYGCLL

SEQ ID NO: 760 - protein, 9 aa, Artificial Sequence
  Artificially Synthesized Peptide
TQVCTGTDM

SEQ ID NO: 761 - protein, 11 aa, Artificial Sequence
  Artificially Synthesized Peptide
TQVCTGTDMKL

SEQ ID NO: 762 - protein, 8 aa, Artificial Sequence
  Artificially Synthesized Peptide
TVCAGGCA

SEQ ID NO: 763 - protein, 8 aa, Artificial Sequence
  Artificially Synthesized Peptide
TVPLPSET

SEQ ID NO: 764 - protein, 8 aa, Artificial Sequence
  Artificially Synthesized Peptide
TVQLVTQL

SEQ ID NO: 765 - protein, 9 aa, Artificial Sequence
  Artificially Synthesized Peptide
TVQLVTQLM

SEQ ID NO: 766 - protein, 10 aa, Artificial Sequence
  Artificially Synthesized Peptide
TVWELMTFGA

SEQ ID NO: 767 - protein, 8 aa, Artificial Sequence
  Artificially Synthesized Peptide
TVYKGIWI

SEQ ID NO: 768 - protein, 10 aa, Artificial Sequence
  Artificially Synthesized Peptide
VAIKVLRENT

SEQ ID NO: 769 - protein, 8 aa, Artificial Sequence
  Artificially Synthesized Peptide
VARCPSGV

SEQ ID NO: 770 - protein, 10 aa, Artificial Sequence
  Artificially Synthesized Peptide
VIQNEDLGPA

SEQ ID NO: 771 - protein, 11 aa, Artificial Sequence
  Artificially Synthesized Peptide
VIRGRILHNGA

SEQ ID NO: 772 - protein, 8 aa, Artificial Sequence
  Artificially Synthesized Peptide
VLDNGDPL

SEQ ID NO: 773 - protein, 11 aa, Artificial Sequence
  Artificially Synthesized Peptide
VLDNGDPLNNT

SEQ ID NO: 774 - protein, 9 aa, Artificial Sequence
  Artificially Synthesized Peptide
VLGSGAFGT

SEQ ID NO: 775 - protein, 10 aa, Artificial Sequence
  Artificially Synthesized Peptide
VLGSGAFGTV

SEQ ID NO: 776 - protein, 8 aa, Artificial Sequence
  Artificially Synthesized Peptide
VLGVVFGI

SEQ ID NO: 777 - protein, 9 aa, Artificial Sequence
  Artificially Synthesized Peptide
VLGVVFGIL

SEQ ID NO: 778 - protein, 10 aa, Artificial Sequence
  Artificially Synthesized Peptide
VLGVVFGILI

SEQ ID NO: 779 - protein, 8 aa, Artificial Sequence
  Artificially Synthesized Peptide
VLIAHNQV

SEQ ID NO: 780 - protein, 11 aa, Artificial Sequence
  Artificially Synthesized Peptide
VLIAHNQVRQV

SEQ ID NO: 781 - protein, 9 aa, Artificial Sequence
  Artificially Synthesized Peptide
VLIQRNPQL

SEQ ID NO: 782 - protein, 10 aa, Artificial Sequence
  Artificially Synthesized Peptide
VLQGLPREYV

SEQ ID NO: 783 - protein, 10 aa, Artificial Sequence
  Artificially Synthesized Peptide
VLRENTSPKA

SEQ ID NO: 784 - protein, 9 aa, Artificial Sequence
  Artificially Synthesized Peptide
VLVKSPNHV

SEQ ID NO: 785 - protein, 11 aa, Artificial Sequence
  Artificially Synthesized Peptide
VLVKSPNHVKI

SEQ ID NO: 786 - protein, 10 aa, Artificial Sequence
  Artificially Synthesized Peptide
VMAGVGSPYV

SEQ ID NO: 787 - protein, 8 aa, Artificial Sequence
  Artificially Synthesized Peptide
VQGNLELT

SEQ ID NO: 788 - protein, 10 aa, Artificial Sequence
  Artificially Synthesized Peptide
VQGNLELTYL

SEQ ID NO: 789 - protein, 8 aa, Artificial Sequence
  Artificially Synthesized Peptide
VQGYVLIA

SEQ ID NO: 790 - protein, 8 aa, Artificial Sequence
  Artificially Synthesized Peptide
VQLVTQLM

SEQ ID NO: 791 - protein, 9 aa, Artificial Sequence
  Artificially Synthesized Peptide
VTACPYNYL

SEQ ID NO: 792 - protein, 11 aa, Artificial Sequence
  Artificially Synthesized Peptide
VTACPYNYLST

SEQ ID NO: 793 - protein, 8 aa, Artificial Sequence
  Artificially Synthesized Peptide
VTCFGPEA

SEQ ID NO: 794 - protein, 9 aa, Artificial Sequence
  Artificially Synthesized Peptide
VTGASPGGL

SEQ ID NO: 795 - protein, 10 aa, Artificial Sequence
  Artificially Synthesized Peptide
VTQLMPYGCL

SEQ ID NO: 796 - protein, 11 aa, Artificial Sequence
  Artificially Synthesized Peptide
VTQLMPYGCLL

SEQ ID NO: 797 - protein, 10 aa, Artificial Sequence
  Artificially Synthesized Peptide
VTSANIQEFA

SEQ ID NO: 798 - protein, 8 aa, Artificial Sequence
  Artificially Synthesized Peptide
VTVWELMT

SEQ ID NO: 799 - protein, 11 aa, Artificial Sequence
  Artificially Synthesized Peptide
VTVWELMTFGA

SEQ ID NO: 800 - protein, 11 aa, Artificial Sequence
  Artificially Synthesized Peptide
VTYNTDTFESM

SEQ ID NO: 801 - protein, 8 aa, Artificial Sequence
  Artificially Synthesized Peptide
VVGILLVV

SEQ ID NO: 802 - protein, 9 aa, Artificial Sequence
  Artificially Synthesized Peptide
VVGILLVVV

SEQ ID NO: 803 - protein, 10 aa, Artificial Sequence
  Artificially Synthesized Peptide
VVGILLVVVL

SEQ ID NO: 804 - protein, 8 aa, Artificial Sequence
  Artificially Synthesized Peptide
VVIQNEDL

SEQ ID NO: 805 - protein, 11 aa, Artificial Sequence
  Artificially Synthesized Peptide
VVIQNEDLGPA

SEQ ID NO: 806 - protein, 11 aa, Artificial Sequence
  Artificially Synthesized Peptide
VVKDVFAFGGA

SEQ ID NO: 807 - protein, 9 aa, Artificial Sequence
  Artificially Synthesized Peptide
VVLGVVFGI

SEQ ID NO: 808 - protein, 10 aa, Artificial Sequence
  Artificially Synthesized Peptide
VVLGVVFGIL

SEQ ID NO: 809 - protein, 11 aa, Artificial Sequence
  Artificially Synthesized Peptide
VVLGVVFGILI

SEQ ID NO: 810 - protein, 8 aa, Artificial Sequence
  Artificially Synthesized Peptide
VVQGNLEL

SEQ ID NO: 811 - protein, 9 aa, Artificial Sequence
  Artificially Synthesized Peptide
VVQGNLELT

SEQ ID NO: 812 - protein, 11 aa, Artificial Sequence
  Artificially Synthesized Peptide
VVQGNLELTYL

SEQ ID NO: 813 - protein, 10 aa, Artificial Sequence
  Artificially Synthesized Peptide
VVVLGVVFGI

SEQ ID NO: 814 - protein, 11 aa, Artificial Sequence
  Artificially Synthesized Peptide
VVVLGVVFGIL

SEQ ID NO: 815 - protein, 8 aa, Artificial Sequence
  Artificially Synthesized Peptide
WIPDGENV

SEQ ID NO: 816 - protein, 10 aa, Artificial Sequence
  Artificially Synthesized Peptide
WIPDGENVKI

SEQ ID NO: 817 - protein, 10 aa, Artificial Sequence
  Artificially Synthesized Peptide
WLGLRSLREL

SEQ ID NO: 818 - protein, 8 aa, Artificial Sequence
  Artificially Synthesized Peptide
WMALESIL

SEQ ID NO: 819 - protein, 9 aa, Artificial Sequence
  Artificially Synthesized Peptide
YISAWPDSL

SEQ ID NO: 820 - protein, 8 aa, Artificial Sequence
  Artificially Synthesized Peptide
YLEDVRLV

SEQ ID NO: 821 - protein, 8 aa, Artificial Sequence
  Artificially Synthesized Peptide
YLGLDVPV

SEQ ID NO: 822 - protein, 8 aa, Artificial Sequence
  Artificially Synthesized Peptide
YLPTNASL

SEQ ID NO: 823 - protein, 11 aa, Artificial Sequence
  Artificially Synthesized Peptide
YLPTNASLSFL

SEQ ID NO: 824 - protein, 10 aa, Artificial Sequence
  Artificially Synthesized Peptide
YLSTDVGSCT

SEQ ID NO: 825 - protein, 11 aa, Artificial Sequence
  Artificially Synthesized Peptide
YLSTDVGSCTL

SEQ ID NO: 826 - protein, 8 aa, Artificial Sequence
  Artificially Synthesized Peptide
YLTPQGGA

SEQ ID NO: 827 - protein, 9 aa, Artificial Sequence
  Artificially Synthesized Peptide
YLTPQGGAA

SEQ ID NO: 828 - protein, 11 aa, Artificial Sequence
  Artificially Synthesized Peptide
YLYISAWPDSL

SEQ ID NO: 829 - protein, 9 aa, Artificial Sequence
  Artificially Synthesized Peptide
YMIMVKCWM

SEQ ID NO: 830 - protein, 10 aa, Artificial Sequence
  Artificially Synthesized Peptide
YMIMVKCWMI

SEQ ID NO: 831 - protein, 10 aa, Artificial Sequence
  Artificially Synthesized Peptide
YQDTILWKDI

SEQ ID NO: 832 - protein, 11 aa, Artificial Sequence
  Artificially Synthesized Peptide
YQGCQVVQGNL

SEQ ID NO: 833 - protein, 8 aa, Artificial Sequence
  Artificially Synthesized Peptide
YTFGASCV

SEQ ID NO: 834 - protein, 9 aa, Artificial Sequence
  Artificially Synthesized Peptide
YTFGASCVT

SEQ ID NO: 835 - protein, 10 aa, Artificial Sequence
  Artificially Synthesized Peptide
YTFGASCVTA

SEQ ID NO: 836 - protein, 10 aa, Artificial Sequence
  Artificially Synthesized Peptide
YTMRRLLQET

SEQ ID NO: 837 - protein, 9 aa, Artificial Sequence
  Artificially Synthesized Peptide
YVLIAHNQV

SEQ ID NO: 838 - protein, 11 aa, Artificial Sequence
  Artificially Synthesized Peptide
YVMAGVGSPYV

SEQ ID NO: 839 - protein, 8 aa, Artificial Sequence
  Artificially Synthesized Peptide
YVNARHCL

SEQ ID NO: 840 - protein, 8 aa, Artificial Sequence
  Artificially Synthesized Peptide
YVSRLLGI

SEQ ID NO: 841 - protein, 10 aa, Artificial Sequence
  Artificially Synthesized Peptide
YVSRLLGICL

SEQ ID NO: 842 - protein, 11 aa, Artificial Sequence
  Artificially Synthesized Peptide
YVSRLLGICLT

SEQ ID NO: 843 - protein, 8 aa, Artificial Sequence
  Artificially Synthesized Peptide
AAGCTGPK

SEQ ID NO: 844 - protein, 8 aa, Artificial Sequence
  Artificially Synthesized Peptide
AARNVLVK

SEQ ID NO: 845 - protein, 11 aa, Artificial Sequence
  Artificially Synthesized Peptide
AARPAGATLER

SEQ ID NO: 846 - protein, 8 aa, Artificial Sequence
  Artificially Synthesized Peptide
ALESILRR

SEQ ID NO: 847 - protein, 9 aa, Artificial Sequence
  Artificially Synthesized Peptide
ALESILRRR

SEQ ID NO: 848 - protein, 8 aa, Artificial Sequence
  Artificially Synthesized Peptide
ALLHTANR

SEQ ID NO: 849 - protein, 9 aa, Artificial Sequence
  Artificially Synthesized Peptide
ALTLIDTNR

SEQ ID NO: 850 - protein, 11 aa, Artificial Sequence
  Artificially Synthesized Peptide
ALTLIDTNRSR

SEQ ID NO: 851 - protein, 9 aa, Artificial Sequence
  Artificially Synthesized Peptide
AMPNQAQMR

SEQ ID NO: 852 - protein, 11 aa, Artificial Sequence
  Artificially Synthesized Peptide
ASPETHLDMLR

SEQ ID NO: 853 - protein, 10 aa, Artificial Sequence
  Artificially Synthesized Peptide
ASPLDSTFYR

SEQ ID NO: 854 - protein, 9 aa, Artificial Sequence
  Artificially Synthesized Peptide
CAAGCTGPK

SEQ ID NO: 855 - protein, 9 aa, Artificial Sequence
  Artificially Synthesized Peptide
CAGGCARCK

SEQ ID NO: 856 - protein, 10 aa, Artificial Sequence
  Artificially Synthesized Peptide
CLLDHVRENR

SEQ ID NO: 857 - protein, 9 aa, Artificial Sequence
  Artificially Synthesized Peptide
CSPMCKGSR

SEQ ID NO: 858 - protein, 9 aa, Artificial Sequence
  Artificially Synthesized Peptide
CTGTDMKLR

SEQ ID NO: 859 - protein, 11 aa, Artificial Sequence
  Artificially Synthesized Peptide
CTHSCVDLDDK

SEQ ID NO: 860 - protein, 11 aa, Artificial Sequence
  Artificially Synthesized Peptide
CTIDVYMIMVK

SEQ ID NO: 861 - protein, 8 aa, Artificial Sequence
  Artificially Synthesized Peptide
CVACAHYK

SEQ ID NO: 862 - protein, 10 aa, Artificial Sequence
  Artificially Synthesized Peptide
CVARCPSGVK

SEQ ID NO: 863 - protein, 9 aa, Artificial Sequence
  Artificially Synthesized Peptide
CVNCSQFLR

SEQ ID NO: 864 - protein, 10 aa, Artificial Sequence
  Artificially Synthesized Peptide
DLAARNVLVK

SEQ ID NO: 865 - protein, 8 aa, Artificial Sequence
  Artificially Synthesized Peptide
DLGMGAAK

SEQ ID NO: 866 - protein, 8 aa, Artificial Sequence
  Artificially Synthesized Peptide
DLLEKGER

SEQ ID NO: 867 - protein, 11 aa, Artificial Sequence
  Artificially Synthesized Peptide
DLLNWCMQIAK

SEQ ID NO: 868 - protein, 9 aa, Artificial Sequence
  Artificially Synthesized Peptide
DLSYMPIWK

SEQ ID NO: 869 - protein, 9 aa, Artificial Sequence
  Artificially Synthesized Peptide
DSECRPRFR

SEQ ID NO: 870 - protein, 11 aa, Artificial Sequence
  Artificially Synthesized Peptide
DTILWKDIFHK

SEQ ID NO: 871 - protein, 10 aa, Artificial Sequence
  Artificially Synthesized Peptide
DVRPQPPSPR

SEQ ID NO: 872 - protein, 8 aa, Artificial Sequence
  Artificially Synthesized Peptide
DVYMIMVK

SEQ ID NO: 873 - protein, 11 aa, Artificial Sequence
  Artificially Synthesized Peptide
EILKGGVLIQR

SEQ ID NO: 874 - protein, 8 aa, Artificial Sequence
  Artificially Synthesized Peptide
EIPDLLEK

SEQ ID NO: 875 - protein, 11 aa, Artificial Sequence
  Artificially Synthesized Peptide
EIPDLLEKGER

SEQ ID NO: 876 - protein, 8 aa, Artificial Sequence
  Artificially Synthesized Peptide
ELMTFGAK

SEQ ID NO: 877 - protein, 8 aa, Artificial Sequence
  Artificially Synthesized Peptide
ELVSEFSR

SEQ ID NO: 878 - protein, 11 aa, Artificial Sequence
  Artificially Synthesized Peptide
ELVSEFSRMAR

SEQ ID NO: 879 - protein, 9 aa, Artificial Sequence
  Artificially Synthesized Peptide
ESMPNPEGR

SEQ ID NO: 880 - protein, 11 aa, Artificial Sequence
  Artificially Synthesized Peptide
ESSEDCQSLTR

SEQ ID NO: 881 - protein, 8 aa, Artificial Sequence
  Artificially Synthesized Peptide
ETELRKVK

SEQ ID NO: 882 - protein, 10 aa, Artificial Sequence
  Artificially Synthesized Peptide
ETEYHADGGK

SEQ ID NO: 883 - protein, 8 aa, Artificial Sequence
  Artificially Synthesized Peptide
ETHLDMLR

SEQ ID NO: 884 - protein, 10 aa, Artificial Sequence
  Artificially Synthesized Peptide
EVTAEDGTQR

SEQ ID NO: 885 - protein, 10 aa, Artificial Sequence
  Artificially Synthesized Peptide
FSRMARDPQR

SEQ ID NO: 886 - protein, 8 aa, Artificial Sequence
  Artificially Synthesized Peptide
GAFGTVYK

SEQ ID NO: 887 - protein, 9 aa, Artificial Sequence
  Artificially Synthesized Peptide
GAGGMVHHR

SEQ ID NO: 888 - protein, 11 aa, Artificial Sequence
  Artificially Synthesized Peptide
GAGGMVHHRHR

SEQ ID NO: 889 - protein, 11 aa, Artificial Sequence
  Artificially Synthesized Peptide
GAKPYDGIPAR

SEQ ID NO: 890 - protein, 10 aa, Artificial Sequence
  Artificially Synthesized Peptide
GAMPNQAQMR

SEQ ID NO: 891 - protein, 8 aa, Artificial Sequence
  Artificially Synthesized Peptide
GAPPSTFK

SEQ ID NO: 892 - protein, 8 aa, Artificial Sequence
  Artificially Synthesized Peptide
GASPGGLR

SEQ ID NO: 893 - protein, 8 aa, Artificial Sequence
  Artificially Synthesized Peptide
GATLERPK

SEQ ID NO: 894 - protein, 10 aa, Artificial Sequence
  Artificially Synthesized Peptide
GILIKRRQQK

SEQ ID NO: 895 - protein, 8 aa, Artificial Sequence
  Artificially Synthesized Peptide
GISWLGLR

SEQ ID NO: 896 - protein, 11 aa, Artificial Sequence
  Artificially Synthesized Peptide
GISWLGLRSLR

SEQ ID NO: 897 - protein, 11 aa, Artificial Sequence
  Artificially Synthesized Peptide
GIWIPDGENVK

SEQ ID NO: 898 - protein, 10 aa, Artificial Sequence
  Artificially Synthesized Peptide
GLACHQLCAR

SEQ ID NO: 899 - protein, 11 aa, Artificial Sequence
  Artificially Synthesized Peptide
GLEPSEEEAPR

SEQ ID NO: 900 - protein, 10 aa, Artificial Sequence
  Artificially Synthesized Peptide
GLGISWLGLR

SEQ ID NO: 901 - protein, 8 aa, Artificial Sequence
  Artificially Synthesized Peptide
GLGMEHLR

SEQ ID NO: 902 - protein, 11 aa, Artificial Sequence
  Artificially Synthesized Peptide
GLGMEHLREVR

SEQ ID NO: 903 - protein, 10 aa, Artificial Sequence
  Artificially Synthesized Peptide
GLPREYVNAR

SEQ ID NO: 904 - protein, 8 aa, Artificial Sequence
  Artificially Synthesized Peptide
GLRELQLR

SEQ ID NO: 905 - protein, 9 aa, Artificial Sequence
  Artificially Synthesized Peptide
GMEHLREVR

SEQ ID NO: 906 - protein, 9 aa, Artificial Sequence
  Artificially Synthesized Peptide
GMSYLEDVR

SEQ ID NO: 907 - protein, 8 aa, Artificial Sequence
  Artificially Synthesized Peptide
GMVHHRHR

SEQ ID NO: 908 - protein, 10 aa, Artificial Sequence
  Artificially Synthesized Peptide
GSGAFGTVYK

SEQ ID NO: 909 - protein, 10 aa, Artificial Sequence
  Artificially Synthesized Peptide
GTQRCEKCSK

SEQ ID NO: 910 - protein, 9 aa, Artificial Sequence
  Artificially Synthesized Peptide
GVGSPYVSR

SEQ ID NO: 911 - protein, 9 aa, Artificial Sequence
  Artificially Synthesized Peptide
GVVFGILIK

SEQ ID NO: 912 - protein, 10 aa, Artificial Sequence
  Artificially Synthesized Peptide
GVVFGILIKR

SEQ ID NO: 913 - protein, 11 aa, Artificial Sequence
  Artificially Synthesized Peptide
GVVFGILIKRR

SEQ ID NO: 914 - protein, 10 aa, Artificial Sequence
  Artificially Synthesized Peptide
HADGGKVPIK

SEQ ID NO: 915 - protein, 9 aa, Artificial Sequence
  Artificially Synthesized Peptide
HSCVDLDDK

SEQ ID NO: 916 - protein, 10 aa, Artificial Sequence
  Artificially Synthesized Peptide
HTVPWDQLFR

SEQ ID NO: 917 - protein, 11 aa, Artificial Sequence
  Artificially Synthesized Peptide
HVKITDFGLAR

SEQ ID NO: 918 - protein, 8 aa, Artificial Sequence
  Artificially Synthesized Peptide
HVRENRGR

SEQ ID NO: 919 - protein, 9 aa, Artificial Sequence
  Artificially Synthesized Peptide
ILIKRRQQK

SEQ ID NO: 920 - protein, 11 aa, Artificial Sequence
  Artificially Synthesized Peptide
ILIKRRQQKIR

SEQ ID NO: 921 - protein, 8 aa, Artificial Sequence
  Artificially Synthesized Peptide
ILKETELR

SEQ ID NO: 922 - protein, 9 aa, Artificial Sequence
  Artificially Synthesized Peptide
ILKETELRK

SEQ ID NO: 923 - protein, 11 aa, Artificial Sequence
  Artificially Synthesized Peptide
ILKETELRKVK

SEQ ID NO: 924 - protein, 10 aa, Artificial Sequence
  Artificially Synthesized Peptide
ILKGGVLIQR

SEQ ID NO: 925 - protein, 9 aa, Artificial Sequence
  Artificially Synthesized Peptide
ILWKDIFHK

SEQ ID NO: 926 - protein, 10 aa, Artificial Sequence
  Artificially Synthesized Peptide
ISWLGLRSLR

SEQ ID NO: 927 - protein, 8 aa, Artificial Sequence
  Artificially Synthesized Peptide
ITDFGLAR

SEQ ID NO: 928 - protein, 10 aa, Artificial Sequence
  Artificially Synthesized Peptide
KIPVAIKVLR

SEQ ID NO: 929 - protein, 8 aa, Artificial Sequence
  Artificially Synthesized Peptide
KIRKYTMR

SEQ ID NO: 930 - protein, 9 aa, Artificial Sequence
  Artificially Synthesized Peptide
KIRKYTMRR

SEQ ID NO: 931 - protein, 9 aa, Artificial Sequence
  Artificially Synthesized Peptide
KITDFGLAR

SEQ ID NO: 932 - protein, 10 aa, Artificial Sequence
  Artificially Synthesized Peptide
KVLRENTSPK

SEQ ID NO: 933 - protein, 9 aa, Artificial Sequence
  Artificially Synthesized Peptide
LAARNVLVK

SEQ ID NO: 934 - protein, 9 aa, Artificial Sequence
  Artificially Synthesized Peptide
LACHQLCAR

SEQ ID NO: 935 - protein, 10 aa, Artificial Sequence
  Artificially Synthesized Peptide
LALTLIDTNR

SEQ ID NO: 936 - protein, 8 aa, Artificial Sequence
  Artificially Synthesized Peptide
LIAHNQVR

SEQ ID NO: 937 - protein, 8 aa, Artificial Sequence
  Artificially Synthesized Peptide
LIDTNRSR

SEQ ID NO: 938 - protein, 8 aa, Artificial Sequence
  Artificially Synthesized Peptide
LIKRRQQK

SEQ ID NO: 939 - protein, 10 aa, Artificial Sequence
  Artificially Synthesized Peptide
LIKRRQQKIR

SEQ ID NO: 940 - protein, 11 aa, Artificial Sequence
  Artificially Synthesized Peptide
LIKRRQQKIRK

SEQ ID NO: 941 - protein, 9 aa, Artificial Sequence
  Artificially Synthesized Peptide
LLDHVRENR

SEQ ID NO: 942 - protein, 11 aa, Artificial Sequence
  Artificially Synthesized Peptide
LLDHVRENRGR

SEQ ID NO: 943 - protein, 10 aa, Artificial Sequence
  Artificially Synthesized Peptide
LLNWCMQIAK

SEQ ID NO: 944 - protein, 10 aa, Artificial Sequence
  Artificially Synthesized Peptide
LSPGKNGVVK

SEQ ID NO: 945 - protein, 11 aa, Artificial Sequence
  Artificially Synthesized Peptide
LSVFQNLQVIR

SEQ ID NO: 946 - protein, 8 aa, Artificial Sequence
  Artificially Synthesized Peptide
LSYMPIWK

SEQ ID NO: 947 - protein, 8 aa, Artificial Sequence
  Artificially Synthesized Peptide
LTLIDTNR

SEQ ID NO: 948 - protein, 10 aa, Artificial Sequence
  Artificially Synthesized Peptide
LTLIDTNRSR

SEQ ID NO: 949 - protein, 9 aa, Artificial Sequence
  Artificially Synthesized Peptide
LVHRDLAAR

SEQ ID NO: 950 - protein, 9 aa, Artificial Sequence
  Artificially Synthesized Peptide
LVKSPNHVK

SEQ ID NO: 951 - protein, 10 aa, Artificial Sequence
  Artificially Synthesized Peptide
LVSEFSRMAR

SEQ ID NO: 952 - protein, 11 aa, Artificial Sequence
  Artificially Synthesized Peptide
MAGVGSPYVSR

SEQ ID NO: 953 - protein, 8 aa, Artificial Sequence
  Artificially Synthesized Peptide
MALESILR

SEQ ID NO: 954 - protein, 9 aa, Artificial Sequence
  Artificially Synthesized Peptide
MALESILRR

SEQ ID NO: 955 - protein, 10 aa, Artificial Sequence
  Artificially Synthesized Peptide
MALESILRRR

SEQ ID NO: 956 - protein, 9 aa, Artificial Sequence
  Artificially Synthesized Peptide
MIDSECRPR

SEQ ID NO: 957 - protein, 11 aa, Artificial Sequence
  Artificially Synthesized Peptide
MIDSECRPRFR

SEQ ID NO: 958 - protein, 8 aa, Artificial Sequence
  Artificially Synthesized Peptide
MSYLEDVR

SEQ ID NO: 959 - protein, 9 aa, Artificial Sequence
  Artificially Synthesized Peptide
NIQEFAGCK

SEQ ID NO: 960 - protein, 10 aa, Artificial Sequence
  Artificially Synthesized Peptide
NIQEFAGCKK

SEQ ID NO: 961 - protein, 8 aa, Artificial Sequence
  Artificially Synthesized Peptide
NLQVIRGR

SEQ ID NO: 962 - protein, 8 aa, Artificial Sequence
  Artificially Synthesized Peptide
NTSPKANK

SEQ ID NO: 963 - protein, 9 aa, Artificial Sequence
  Artificially Synthesized Peptide
NVKIPVAIK

SEQ ID NO: 964 - protein, 11 aa, Artificial Sequence
  Artificially Synthesized Peptide
NVLVKSPNHVK

SEQ ID NO: 965 - protein, 8 aa, Artificial Sequence
  Artificially Synthesized Peptide
PAGATLER

SEQ ID NO: 966 - protein, 10 aa, Artificial Sequence
  Artificially Synthesized Peptide
PAGATLERPK

SEQ ID NO: 967 - protein, 11 aa, Artificial Sequence
  Artificially Synthesized Peptide
PAREIPDLLEK

SEQ ID NO: 968 - protein, 11 aa, Artificial Sequence
  Artificially Synthesized Peptide
PASPLDSTFYR

SEQ ID NO: 969 - protein, 8 aa, Artificial Sequence
  Artificially Synthesized Peptide
PLDSTFYR

SEQ ID NO: 970 - protein, 9 aa, Artificial Sequence
  Artificially Synthesized Peptide
PLQRLRIVR

SEQ ID NO: 971 - protein, 8 aa, Artificial Sequence
  Artificially Synthesized Peptide
PSEEEAPR

SEQ ID NO: 972 - protein, 10 aa, Artificial Sequence
  Artificially Synthesized Peptide
PTHDPSPLQR

SEQ ID NO: 973 - protein, 8 aa, Artificial Sequence
  Artificially Synthesized Peptide
PVAIKVLR

SEQ ID NO: 974 - protein, 11 aa, Artificial Sequence
  Artificially Synthesized Peptide
PVTGASPGGLR

SEQ ID NO: 975 - protein, 9 aa, Artificial Sequence
  Artificially Synthesized Peptide
QALLHTANR

SEQ ID NO: 976 - protein, 8 aa, Artificial Sequence
  Artificially Synthesized Peptide
QAQMRILK

SEQ ID NO: 977 - protein, 11 aa, Artificial Sequence
  Artificially Synthesized Peptide
QLALTLIDTNR

SEQ ID NO: 978 - protein, 11 aa, Artificial Sequence
  Artificially Synthesized Peptide
QLCYQDTILWK

SEQ ID NO: 979 - protein, 10 aa, Artificial Sequence
  Artificially Synthesized Peptide
QLRSLTEILK

SEQ ID NO: 980 - protein, 11 aa, Artificial Sequence
  Artificially Synthesized Peptide
QMRILKETELR

SEQ ID NO: 981 - protein, 9 aa, Artificial Sequence
  Artificially Synthesized Peptide
QVCTGTDMK

SEQ ID NO: 982 - protein, 11 aa, Artificial Sequence
  Artificially Synthesized Peptide
QVCTGTDMKLR

SEQ ID NO: 983 - protein, 8 aa, Artificial Sequence
  Artificially Synthesized Peptide
QVPLQRLR

SEQ ID NO: 984 - protein, 11 aa, Artificial Sequence
  Artificially Synthesized Peptide
QVPLQRLRIVR

SEQ ID NO: 985 - protein, 9 aa, Artificial Sequence
  Artificially Synthesized Peptide
QVRQVPLQR

SEQ ID NO: 986 - protein, 11 aa, Artificial Sequence
  Artificially Synthesized Peptide
QVRQVPLQRLR

SEQ ID NO: 987 - protein, 11 aa, Artificial Sequence
  Artificially Synthesized Peptide
RACHPCSPMCK

SEQ ID NO: 988 - protein, 9 aa, Artificial Sequence
  Artificially Synthesized Peptide
RILKETELR

SEQ ID NO: 989 - protein, 10 aa, Artificial Sequence
  Artificially Synthesized Peptide
RILKETELRK

SEQ ID NO: 990 - protein, 10 aa, Artificial Sequence
  Artificially Synthesized Peptide
RLVHRDLAAR

SEQ ID NO: 991 - protein, 8 aa, Artificial Sequence
  Artificially Synthesized Peptide
RMARDPQR

SEQ ID NO: 992 - protein, 8 aa, Artificial Sequence
  Artificially Synthesized Peptide
RSLTEILK

SEQ ID NO: 993 - protein, 10 aa, Artificial Sequence
  Artificially Synthesized Peptide
RTVCAGGCAR

SEQ ID NO: 994 - protein, 8 aa, Artificial Sequence
  Artificially Synthesized Peptide
RVLQGLPR

SEQ ID NO: 995 - protein, 11 aa, Artificial Sequence
  Artificially Synthesized Peptide
SANIQEFAGCK

SEQ ID NO: 996 - protein, 8 aa, Artificial Sequence
  Artificially Synthesized Peptide
SMPNPEGR

SEQ ID NO: 997 - protein, 10 aa, Artificial Sequence
  Artificially Synthesized Peptide
SSEDCQSLTR

SEQ ID NO: 998 - protein, 11 aa, Artificial Sequence
  Artificially Synthesized Peptide
STQVCTGTDMK

SEQ ID NO: 999 - protein, 10 aa, Artificial Sequence
  Artificially Synthesized Peptide
SVFQNLQVIR

SEQ ID NO: 1000 - protein, 8 aa, Artificial Sequence
  Artificially Synthesized Peptide
TAEDGTQR

SEQ ID NO: 1001 - protein, 11 aa, Artificial Sequence
  Artificially Synthesized Peptide
TAEDGTQRCEK

SEQ ID NO: 1002 - protein, 10 aa, Artificial Sequence
  Artificially Synthesized Peptide
TIDVYMIMVK

SEQ ID NO: 1003 - protein, 10 aa, Artificial Sequence
  Artificially Synthesized Peptide
TILWKDIFHK

SEQ ID NO: 1004 - protein, 9 aa, Artificial Sequence
  Artificially Synthesized Peptide
TLIDTNRSR

SEQ ID NO: 1005 - protein, 11 aa, Artificial Sequence
  Artificially Synthesized Peptide
TLSPGKNGVVK

SEQ ID NO: 1006 - protein, 9 aa, Artificial Sequence
  Artificially Synthesized Peptide
TVCAGGCAR

SEQ ID NO: 1007 - protein, 11 aa, Artificial Sequence
  Artificially Synthesized Peptide
TVCAGGCARCK

SEQ ID NO: 1008 - protein, 9 aa, Artificial Sequence
  Artificially Synthesized Peptide
TVPWDQLFR

SEQ ID NO: 1009 - protein, 11 aa, Artificial Sequence
  Artificially Synthesized Peptide
TVWELMTFGAK

SEQ ID NO: 1010 - protein, 9 aa, Artificial Sequence
  Artificially Synthesized Peptide
VARCPSGVK

SEQ ID NO: 1011 - protein, 11 aa, Artificial Sequence
  Artificially Synthesized Peptide
VLGVVFGILIK

SEQ ID NO: 1012 - protein, 9 aa, Artificial Sequence
  Artificially Synthesized Peptide
VLIAHNQVR

SEQ ID NO: 1013 - protein, 9 aa, Artificial Sequence
  Artificially Synthesized Peptide
VLRENTSPK

SEQ ID NO: 1014 - protein, 10 aa, Artificial Sequence
  Artificially Synthesized Peptide
VLVKSPNHVK

SEQ ID NO: 1015 - protein, 9 aa, Artificial Sequence
  Artificially Synthesized Peptide
VSEFSRMAR

SEQ ID NO: 1016 - protein, 9 aa, Artificial Sequence
  Artificially Synthesized Peptide
VTAEDGTQR

SEQ ID NO: 1017 - protein, 10 aa, Artificial Sequence
  Artificially Synthesized Peptide
VTGASPGGLR

SEQ ID NO: 1018 - protein, 8 aa, Artificial Sequence
  Artificially Synthesized Peptide
VVFGILIK

SEQ ID NO: 1019 - protein, 9 aa, Artificial Sequence
  Artificially Synthesized Peptide
VVFGILIKR

SEQ ID NO: 1020 - protein, 10 aa, Artificial Sequence
  Artificially Synthesized Peptide
VVFGILIKRR

SEQ ID NO: 1021 - protein, 9 aa, Artificial Sequence
  Artificially Synthesized Peptide
WIPDGENVK

SEQ ID NO: 1022 - protein, 8 aa, Artificial Sequence
  Artificially Synthesized Peptide
WLGLRSLR

SEQ ID NO: 1023 - protein, 9 aa, Artificial Sequence
  Artificially Synthesized Peptide
WMALESILR

SEQ ID NO: 1024 - protein, 10 aa, Artificial Sequence
  Artificially Synthesized Peptide
WMALESILRR

SEQ ID NO: 1025 - protein, 11 aa, Artificial Sequence
  Artificially Synthesized Peptide
WMALESILRRR

SEQ ID NO: 1026 - protein, 8 aa, Artificial Sequence
  Artificially Synthesized Peptide
WMIDSECR

SEQ ID NO: 1027 - protein, 10 aa, Artificial Sequence
  Artificially Synthesized Peptide
WMIDSECRPR

SEQ ID NO: 1028 - protein, 10 aa, Artificial Sequence
  Artificially Synthesized Peptide
YLEDVRLVHR

SEQ ID NO: 1029 - protein, 10 aa, Artificial Sequence
  Artificially Synthesized Peptide
YVLIAHNQVR

SEQ ID NO: 1030 - protein, 8 aa, Artificial Sequence
  Artificially Synthesized Peptide
YVNQPDVR

SEQ ID NO: 1031 - protein, 8 aa, Artificial Sequence
  Artificially Synthesized Peptide
AFDNLYYW

SEQ ID NO: 1032 - protein, 11 aa, Artificial Sequence
  Artificially Synthesized Peptide
AFGGAVENPEY

SEQ ID NO: 1033 - protein, 9 aa, Artificial Sequence
  Artificially Synthesized Peptide
AFGTVYKGI

SEQ ID NO: 1034 - protein, 10 aa, Artificial Sequence
  Artificially Synthesized Peptide
AFGTVYKGIW

SEQ ID NO: 1035 - protein, 11 aa, Artificial Sequence
  Artificially Synthesized Peptide
AFGTVYKGIWI

SEQ ID NO: 1036 - protein, 9 aa, Artificial Sequence
  Artificially Synthesized Peptide
AFSPAFDNL

SEQ ID NO: 1037 - protein, 10 aa, Artificial Sequence
  Artificially Synthesized Peptide
AFSPAFDNLY

SEQ ID NO: 1038 - protein, 11 aa, Artificial Sequence
  Artificially Synthesized Peptide
AFSPAFDNLYY

SEQ ID NO: 1039 - protein, 11 aa, Artificial Sequence
  Artificially Synthesized Peptide
ALAVLDNGDPL

SEQ ID NO: 1040 - protein, 8 aa, Artificial Sequence
  Artificially Synthesized Peptide
ALCRWGLL

SEQ ID NO: 1041 - protein, 9 aa, Artificial Sequence
  Artificially Synthesized Peptide
ALCRWGLLL

SEQ ID NO: 1042 - protein, 11 aa, Artificial Sequence
  Artificially Synthesized Peptide
ALCRWGLLLAL

SEQ ID NO: 1043 - protein, 10 aa, Artificial Sequence
  Artificially Synthesized Peptide
ALESILRRRF

SEQ ID NO: 1044 - protein, 9 aa, Artificial Sequence
  Artificially Synthesized Peptide
ALIHHNTHL

SEQ ID NO: 1045 - protein, 11 aa, Artificial Sequence
  Artificially Synthesized Peptide
ALIHHNTHLCF

SEQ ID NO: 1046 - protein, 10 aa, Artificial Sequence
  Artificially Synthesized Peptide
ALVTYNTDTF

SEQ ID NO: 1047 - protein, 8 aa, Artificial Sequence
  Artificially Synthesized Peptide
AMPNQAQM

SEQ ID NO: 1048 - protein, 10 aa, Artificial Sequence
  Artificially Synthesized Peptide
AMPNQAQMRI

SEQ ID NO: 1049 - protein, 11 aa, Artificial Sequence
  Artificially Synthesized Peptide
AMPNQAQMRIL

SEQ ID NO: 1050 - protein, 9 aa, Artificial Sequence
  Artificially Synthesized Peptide
ATLERPKTL

SEQ ID NO: 1051 - protein, 8 aa, Artificial Sequence
  Artificially Synthesized Peptide
AVENPEYL

SEQ ID NO: 1052 - protein, 9 aa, Artificial Sequence
  Artificially Synthesized Peptide
AVLDNGDPL

SEQ ID NO: 1053 - protein, 10 aa, Artificial Sequence
  Artificially Synthesized Peptide
AVTSANIQEF

SEQ ID NO: 1054 - protein, 11 aa, Artificial Sequence
  Artificially Synthesized Peptide
AVVGILLVVVL

SEQ ID NO: 1055 - protein, 9 aa, Artificial Sequence
  Artificially Synthesized Peptide
AWPDSLPDL

SEQ ID NO: 1056 - protein, 9 aa, Artificial Sequence
  Artificially Synthesized Peptide
AYSLTLQGL

SEQ ID NO: 1057 - protein, 11 aa, Artificial Sequence
  Artificially Synthesized Peptide
AYSLTLQGLGI

SEQ ID NO: 1058 - protein, 11 aa, Artificial Sequence
  Artificially Synthesized Peptide
AYVMAGVGSPY

SEQ ID NO: 1059 - protein, 8 aa, Artificial Sequence
  Artificially Synthesized Peptide
CFVHTVPW

SEQ ID NO: 1060 - protein, 11 aa, Artificial Sequence
  Artificially Synthesized Peptide
CFVHTVPWDQL

SEQ ID NO: 1061 - protein, 9 aa, Artificial Sequence
  Artificially Synthesized Peptide
CLHFNHSGI

SEQ ID NO: 1062 - protein, 8 aa, Artificial Sequence
  Artificially Synthesized Peptide
CLTSTVQL

SEQ ID NO: 1063 - protein, 8 aa, Artificial Sequence
  Artificially Synthesized Peptide
CMQIAKGM

SEQ ID NO: 1064 - protein, 10 aa, Artificial Sequence
  Artificially Synthesized Peptide
CMQIAKGMSY

SEQ ID NO: 1065 - protein, 11 aa, Artificial Sequence
  Artificially Synthesized Peptide
CMQIAKGMSYL

SEQ ID NO: 1066 - protein, 10 aa, Artificial Sequence
  Artificially Synthesized Peptide
CTGPKHSDCL

SEQ ID NO: 1067 - protein, 8 aa, Artificial Sequence
  Artificially Synthesized Peptide
CTGTDMKL

SEQ ID NO: 1068 - protein, 10 aa, Artificial Sequence
  Artificially Synthesized Peptide
CTGTDMKLRL

SEQ ID NO: 1069 - protein, 8 aa, Artificial Sequence
  Artificially Synthesized Peptide
CTHSCVDL

SEQ ID NO: 1070 - protein, 8 aa, Artificial Sequence
  Artificially Synthesized Peptide
CTIDVYMI

SEQ ID NO: 1071 - protein, 9 aa, Artificial Sequence
  Artificially Synthesized Peptide
CTIDVYMIM

SEQ ID NO: 1072 - protein, 8 aa, Artificial Sequence
  Artificially Synthesized Peptide
CVEECRVL

SEQ ID NO: 1073 - protein, 11 aa, Artificial Sequence
  Artificially Synthesized Peptide
CVEECRVLQGL

SEQ ID NO: 1074 - protein, 11 aa, Artificial Sequence
  Artificially Synthesized Peptide
CVGEGLACHQL

SEQ ID NO: 1075 - protein, 8 aa, Artificial Sequence
  Artificially Synthesized Peptide
CVNCSQFL

SEQ ID NO: 1076 - protein, 9 aa, Artificial Sequence
  Artificially Synthesized Peptide
CVTACPYNY

SEQ ID NO: 1077 - protein, 10 aa, Artificial Sequence
  Artificially Synthesized Peptide
CVTACPYNYL

SEQ ID NO: 1078 - protein, 9 aa, Artificial Sequence
  Artificially Synthesized Peptide
CYGLGMEHL

SEQ ID NO: 1079 - protein, 8 aa, Artificial Sequence
  Artificially Synthesized Peptide
CYQDTILW

SEQ ID NO: 1080 - protein, 11 aa, Artificial Sequence
  Artificially Synthesized Peptide
CYQDTILWKDI

SEQ ID NO: 1081 - protein, 8 aa, Artificial Sequence
  Artificially Synthesized Peptide
DFGLARLL

SEQ ID NO: 1082 - protein, 10 aa, Artificial Sequence
  Artificially Synthesized Peptide
DFGLARLLDI

SEQ ID NO: 1083 - protein, 9 aa, Artificial Sequence
  Artificially Synthesized Peptide
DIFHKNNQL

SEQ ID NO: 1084 - protein, 11 aa, Artificial Sequence
  Artificially Synthesized Peptide
DIFHKNNQLAL

SEQ ID NO: 1085 - protein, 8 aa, Artificial Sequence
  Artificially Synthesized Peptide
DIQEVQGY

SEQ ID NO: 1086 - protein, 10 aa, Artificial Sequence
  Artificially Synthesized Peptide
DIQEVQGYVL

SEQ ID NO: 1087 - protein, 11 aa, Artificial Sequence
  Artificially Synthesized Peptide
DIQEVQGYVLI

SEQ ID NO: 1088 - protein, 8 aa, Artificial Sequence
  Artificially Synthesized Peptide
DLAARNVL

SEQ ID NO: 1089 - protein, 10 aa, Artificial Sequence
  Artificially Synthesized Peptide
DLGMGAAKGL

SEQ ID NO: 1090 - protein, 8 aa, Artificial Sequence
  Artificially Synthesized Peptide
DLGPASPL

SEQ ID NO: 1091 - protein, 9 aa, Artificial Sequence
  Artificially Synthesized Peptide
DLLEKGERL

SEQ ID NO: 1092 - protein, 9 aa, Artificial Sequence
  Artificially Synthesized Peptide
DLLNWCMQI

SEQ ID NO: 1093 - protein, 8 aa, Artificial Sequence
  Artificially Synthesized Peptide
DLSVFQNL

SEQ ID NO: 1094 - protein, 11 aa, Artificial Sequence
  Artificially Synthesized Peptide
DLSVFQNLQVI

SEQ ID NO: 1095 - protein, 8 aa, Artificial Sequence
  Artificially Synthesized Peptide
DLSYMPIW

SEQ ID NO: 1096 - protein, 10 aa, Artificial Sequence
  Artificially Synthesized Peptide
DLSYMPIWKF

SEQ ID NO: 1097 - protein, 8 aa, Artificial Sequence
  Artificially Synthesized Peptide
DLVDAEEY

SEQ ID NO: 1098 - protein, 9 aa, Artificial Sequence
  Artificially Synthesized Peptide
DLVDAEEYL

SEQ ID NO: 1099 - protein, 11 aa, Artificial Sequence
  Artificially Synthesized Peptide
DMGDLVDAEEY

SEQ ID NO: 1100 - protein, 8 aa, Artificial Sequence
  Artificially Synthesized Peptide
DTILWKDI

SEQ ID NO: 1101 - protein, 9 aa, Artificial Sequence
  Artificially Synthesized Peptide
DTILWKDIF

SEQ ID NO: 1102 - protein, 9 aa, Artificial Sequence
  Artificially Synthesized Peptide
DVFDGDLGM

SEQ ID NO: 1103 - protein, 11 aa, Artificial Sequence
  Artificially Synthesized Peptide
DVGSCTLVCPL

SEQ ID NO: 1104 - protein, 9 aa, Artificial Sequence
  Artificially Synthesized Peptide
DVRLVHRDL

SEQ ID NO: 1105 - protein, 10 aa, Artificial Sequence
  Artificially Synthesized Peptide
DVWSYGVTVW

SEQ ID NO: 1106 - protein, 10 aa, Artificial Sequence
  Artificially Synthesized Peptide
DVYMIMVKCW

SEQ ID NO: 1107 - protein, 11 aa, Artificial Sequence
  Artificially Synthesized Peptide
DVYMIMVKCWM

SEQ ID NO: 1108 - protein, 8 aa, Artificial Sequence
  Artificially Synthesized Peptide
EFAGCKKI

SEQ ID NO: 1109 - protein, 9 aa, Artificial Sequence
  Artificially Synthesized Peptide
EFAGCKKIF

SEQ ID NO: 1110 - protein, 9 aa, Artificial Sequence
  Artificially Synthesized Peptide
EILDEAYVM

SEQ ID NO: 1111 - protein, 8 aa, Artificial Sequence
  Artificially Synthesized Peptide
EILKGGVL

SEQ ID NO: 1112 - protein, 9 aa, Artificial Sequence
  Artificially Synthesized Peptide
EILKGGVLI

SEQ ID NO: 1113 - protein, 8 aa, Artificial Sequence
  Artificially Synthesized Peptide
EITGYLYI

SEQ ID NO: 1114 - protein, 11 aa, Artificial Sequence
  Artificially Synthesized Peptide
EITGYLYISAW

SEQ ID NO: 1115 - protein, 8 aa, Artificial Sequence
  Artificially Synthesized Peptide
ELAALCRW

SEQ ID NO: 1116 - protein, 10 aa, Artificial Sequence
  Artificially Synthesized Peptide
ELAALCRWGL

SEQ ID NO: 1117 - protein, 11 aa, Artificial Sequence
  Artificially Synthesized Peptide
ELAALCRWGLL

SEQ ID NO: 1118 - protein, 8 aa, Artificial Sequence
  Artificially Synthesized Peptide
ELGSGLAL

SEQ ID NO: 1119 - protein, 9 aa, Artificial Sequence
  Artificially Synthesized Peptide
ELGSGLALI

SEQ ID NO: 1120 - protein, 10 aa, Artificial Sequence
  Artificially Synthesized Peptide
ELHCPALVTY

SEQ ID NO: 1121 - protein, 10 aa, Artificial Sequence
  Artificially Synthesized Peptide
ELMTFGAKPY

SEQ ID NO: 1122 - protein, 10 aa, Artificial Sequence
  Artificially Synthesized Peptide
ELQLRSLTEI

SEQ ID NO: 1123 - protein, 11 aa, Artificial Sequence
  Artificially Synthesized Peptide
ELQLRSLTEIL

SEQ ID NO: 1124 - protein, 8 aa, Artificial Sequence
  Artificially Synthesized Peptide
ELRKVKVL

SEQ ID NO: 1125 - protein, 11 aa, Artificial Sequence
  Artificially Synthesized Peptide
ELTYLPTNASL

SEQ ID NO: 1126 - protein, 9 aa, Artificial Sequence
  Artificially Synthesized Peptide
ELVSEFSRM

SEQ ID NO: 1127 - protein, 9 aa, Artificial Sequence
  Artificially Synthesized Peptide
ETDGYVAPL

SEQ ID NO: 1128 - protein, 10 aa, Artificial Sequence
  Artificially Synthesized Peptide
ETELRKVKVL

SEQ ID NO: 1129 - protein, 8 aa, Artificial Sequence
  Artificially Synthesized Peptide
ETELVEPL

SEQ ID NO: 1130 - protein, 10 aa, Artificial Sequence
  Artificially Synthesized Peptide
ETHLDMLRHL

SEQ ID NO: 1131 - protein, 11 aa, Artificial Sequence
  Artificially Synthesized Peptide
ETHLDMLRHLY

SEQ ID NO: 1132 - protein, 9 aa, Artificial Sequence
  Artificially Synthesized Peptide
ETLEEITGY

SEQ ID NO: 1133 - protein, 10 aa, Artificial Sequence
  Artificially Synthesized Peptide
ETLEEITGYL

SEQ ID NO: 1134 - protein, 11 aa, Artificial Sequence
  Artificially Synthesized Peptide
ETLEEITGYLY

SEQ ID NO: 1135 - protein, 8 aa, Artificial Sequence
  Artificially Synthesized Peptide
EVQGYVLI

SEQ ID NO: 1136 - protein, 10 aa, Artificial Sequence
  Artificially Synthesized Peptide
EVRAVTSANI

SEQ ID NO: 1137 - protein, 11 aa, Artificial Sequence
  Artificially Synthesized Peptide
EYHADGGKVPI

SEQ ID NO: 1138 - protein, 9 aa, Artificial Sequence
  Artificially Synthesized Peptide
EYLVPQQGF

SEQ ID NO: 1139 - protein, 10 aa, Artificial Sequence
  Artificially Synthesized Peptide
EYLVPQQGFF

SEQ ID NO: 1140 - protein, 9 aa, Artificial Sequence
  Artificially Synthesized Peptide
EYVNARHCL

SEQ ID NO: 1141 - protein, 11 aa, Artificial Sequence
  Artificially Synthesized Peptide
FLQDIQEVQGY

SEQ ID NO: 1142 - protein, 8 aa, Artificial Sequence
  Artificially Synthesized Peptide
FTHQSDVW

SEQ ID NO: 1143 - protein, 10 aa, Artificial Sequence
  Artificially Synthesized Peptide
FTHQSDVWSY

SEQ ID NO: 1144 - protein, 10 aa, Artificial Sequence
  Artificially Synthesized Peptide
FVHTVPWDQL

SEQ ID NO: 1145 - protein, 11 aa, Artificial Sequence
  Artificially Synthesized Peptide
FVHTVPWDQLF

SEQ ID NO: 1146 - protein, 9 aa, Artificial Sequence
  Artificially Synthesized Peptide
FVVIQNEDL

SEQ ID NO: 1147 - protein, 11 aa, Artificial Sequence
  Artificially Synthesized Peptide
FYRSLLEDDDM

SEQ ID NO: 1148 - protein, 10 aa, Artificial Sequence
  Artificially Synthesized Peptide
GICELHCPAL

SEQ ID NO: 1149 - protein, 10 aa, Artificial Sequence
  Artificially Synthesized Peptide
GICLTSTVQL

SEQ ID NO: 1150 - protein, 11 aa, Artificial Sequence
  Artificially Synthesized Peptide
GILIKRRQQKI

SEQ ID NO: 1151 - protein, 8 aa, Artificial Sequence
  Artificially Synthesized Peptide
GILLVVVL

SEQ ID NO: 1152 - protein, 10 aa, Artificial Sequence
  Artificially Synthesized Peptide
GIPAREIPDL

SEQ ID NO: 1153 - protein, 11 aa, Artificial Sequence
  Artificially Synthesized Peptide
GIPAREIPDLL

SEQ ID NO: 1154 - protein, 10 aa, Artificial Sequence
  Artificially Synthesized Peptide
GISWLGLRSL

SEQ ID NO: 1155 - protein, 11 aa, Artificial Sequence
  Artificially Synthesized Peptide
GLALIHHNTHL

SEQ ID NO: 1156 - protein, 8 aa, Artificial Sequence
  Artificially Synthesized Peptide
GLARLLDI

SEQ ID NO: 1157 - protein, 9 aa, Artificial Sequence
  Artificially Synthesized Peptide
GLGISWLGL

SEQ ID NO: 1158 - protein, 10 aa, Artificial Sequence
  Artificially Synthesized Peptide
GLRELQLRSL

SEQ ID NO: 1159 - protein, 8 aa, Artificial Sequence
  Artificially Synthesized Peptide
GLRSLREL

SEQ ID NO: 1160 - protein, 8 aa, Artificial Sequence
  Artificially Synthesized Peptide
GMGAAKGL

SEQ ID NO: 1161 - protein, 11 aa, Artificial Sequence
  Artificially Synthesized Peptide
GMGAAKGLQSL

SEQ ID NO: 1162 - protein, 10 aa, Artificial Sequence
  Artificially Synthesized Peptide
GMSYLEDVRL

SEQ ID NO: 1163 - protein, 8 aa, Artificial Sequence
  Artificially Synthesized Peptide
GTDMKLRL

SEQ ID NO: 1164 - protein, 10 aa, Artificial Sequence
  Artificially Synthesized Peptide
GTPTAENPEY

SEQ ID NO: 1165 - protein, 11 aa, Artificial Sequence
  Artificially Synthesized Peptide
GTPTAENPEYL

SEQ ID NO: 1166 - protein, 9 aa, Artificial Sequence
  Artificially Synthesized Peptide
GTQLFEDNY

SEQ ID NO: 1167 - protein, 11 aa, Artificial Sequence
  Artificially Synthesized Peptide
GTQLFEDNYAL

SEQ ID NO: 1168 - protein, 8 aa, Artificial Sequence
  Artificially Synthesized Peptide
GTVYKGIW

SEQ ID NO: 1169 - protein, 9 aa, Artificial Sequence
  Artificially Synthesized Peptide
GTVYKGIWI

SEQ ID NO: 1170 - protein, 10 aa, Artificial Sequence
  Artificially Synthesized Peptide
GVGSPYVSRL

SEQ ID NO: 1171 - protein, 11 aa, Artificial Sequence
  Artificially Synthesized Peptide
GVGSPYVSRLL

SEQ ID NO: 1172 - protein, 8 aa, Artificial Sequence
  Artificially Synthesized Peptide
GVKPDLSY

SEQ ID NO: 1173 - protein, 9 aa, Artificial Sequence
  Artificially Synthesized Peptide
GVKPDLSYM

SEQ ID NO: 1174 - protein, 11 aa, Artificial Sequence
  Artificially Synthesized Peptide
GVKPDLSYMPI

SEQ ID NO: 1175 - protein, 10 aa, Artificial Sequence
  Artificially Synthesized Peptide
GVLIQRNPQL

SEQ ID NO: 1176 - protein, 8 aa, Artificial Sequence
  Artificially Synthesized Peptide
GVTVWELM

SEQ ID NO: 1177 - protein, 10 aa, Artificial Sequence
  Artificially Synthesized Peptide
GVTVWELMTF

SEQ ID NO: 1178 - protein, 8 aa, Artificial Sequence
  Artificially Synthesized Peptide
GVVFGILI

SEQ ID NO: 1179 - protein, 9 aa, Artificial Sequence
  Artificially Synthesized Peptide
GVVKDVFAF

SEQ ID NO: 1180 - protein, 8 aa, Artificial Sequence
  Artificially Synthesized Peptide
GYLYISAW

SEQ ID NO: 1181 - protein, 10 aa, Artificial Sequence
  Artificially Synthesized Peptide
HFNHSGICEL

SEQ ID NO: 1182 - protein, 10 aa, Artificial Sequence
  Artificially Synthesized Peptide
HLCFVHTVPW

SEQ ID NO: 1183 - protein, 8 aa, Artificial Sequence
  Artificially Synthesized Peptide
HLDMLRHL

SEQ ID NO: 1184 - protein, 9 aa, Artificial Sequence
  Artificially Synthesized Peptide
HLDMLRHLY

SEQ ID NO: 1185 - protein, 8 aa, Artificial Sequence
  Artificially Synthesized Peptide
HTVPWDQL

SEQ ID NO: 1186 - protein, 9 aa, Artificial Sequence
  Artificially Synthesized Peptide
HTVPWDQLF

SEQ ID NO: 1187 - protein, 9 aa, Artificial Sequence
  Artificially Synthesized Peptide
HVKITDFGL

SEQ ID NO: 1188 - protein, 9 aa, Artificial Sequence
  Artificially Synthesized Peptide
HVRENRGRL

SEQ ID NO: 1189 - protein, 8 aa, Artificial Sequence
  Artificially Synthesized Peptide
IFGSLAFL

SEQ ID NO: 1190 - protein, 8 aa, Artificial Sequence
  Artificially Synthesized Peptide
IFHKNNQL

SEQ ID NO: 1191 - protein, 10 aa, Artificial Sequence
  Artificially Synthesized Peptide
IFHKNNQLAL

SEQ ID NO: 1192 - protein, 8 aa, Artificial Sequence
  Artificially Synthesized Peptide
IISAVVGI

SEQ ID NO: 1193 - protein, 9 aa, Artificial Sequence
  Artificially Synthesized Peptide
IISAVVGIL

SEQ ID NO: 1194 - protein, 10 aa, Artificial Sequence
  Artificially Synthesized Peptide
IISAVVGILL

SEQ ID NO: 1195 - protein, 8 aa, Artificial Sequence
  Artificially Synthesized Peptide
ILDEAYVM

SEQ ID NO: 1196 - protein, 9 aa, Artificial Sequence
  Artificially Synthesized Peptide
ILHNGAYSL

SEQ ID NO: 1197 - protein, 11 aa, Artificial Sequence
  Artificially Synthesized Peptide
ILHNGAYSLTL

SEQ ID NO: 1198 - protein, 10 aa, Artificial Sequence
  Artificially Synthesized Peptide
ILIKRRQQKI

SEQ ID NO: 1199 - protein, 8 aa, Artificial Sequence
  Artificially Synthesized Peptide
ILKGGVLI

SEQ ID NO: 1200 - protein, 11 aa, Artificial Sequence
  Artificially Synthesized Peptide
ILLVVVLGVVF

SEQ ID NO: 1201 - protein, 8 aa, Artificial Sequence
  Artificially Synthesized Peptide
IMVKCWMI

SEQ ID NO: 1202 - protein, 9 aa, Artificial Sequence
  Artificially Synthesized Peptide
ITDFGLARL

SEQ ID NO: 1203 - protein, 10 aa, Artificial Sequence
  Artificially Synthesized Peptide
ITDFGLARLL

SEQ ID NO: 1204 - protein, 10 aa, Artificial Sequence
  Artificially Synthesized Peptide
ITGYLYISAW

SEQ ID NO: 1205 - protein, 8 aa, Artificial Sequence
  Artificially Synthesized Peptide
IVRGTQLF

SEQ ID NO: 1206 - protein, 11 aa, Artificial Sequence
  Artificially Synthesized Peptide
IWIPDGENVKI

SEQ ID NO: 1207 - protein, 8 aa, Artificial Sequence
  Artificially Synthesized Peptide
KIFGSLAF

SEQ ID NO: 1208 - protein, 9 aa, Artificial Sequence
  Artificially Synthesized Peptide
KIFGSLAFL

SEQ ID NO: 1209 - protein, 9 aa, Artificial Sequence
  Artificially Synthesized Peptide
KIPVAIKVL

SEQ ID NO: 1210 - protein, 10 aa, Artificial Sequence
  Artificially Synthesized Peptide
KIRKYTMRRL

SEQ ID NO: 1211 - protein, 11 aa, Artificial Sequence
  Artificially Synthesized Peptide
KIRKYTMRRLL

SEQ ID NO: 1212 - protein, 10 aa, Artificial Sequence
  Artificially Synthesized Peptide
KITDFGLARL

SEQ ID NO: 1213 - protein, 11 aa, Artificial Sequence
  Artificially Synthesized Peptide
KITDFGLARLL

SEQ ID NO: 1214 - protein, 10 aa, Artificial Sequence
  Artificially Synthesized Peptide
KVKVLGSGAF

SEQ ID NO: 1215 - protein, 8 aa, Artificial Sequence
  Artificially Synthesized Peptide
KVLGSGAF

SEQ ID NO: 1216 - protein, 9 aa, Artificial Sequence
  Artificially Synthesized Peptide
KVPIKWMAL

SEQ ID NO: 1217 - protein, 8 aa, Artificial Sequence
  Artificially Synthesized Peptide
KWMALESI

SEQ ID NO: 1218 - protein, 9 aa, Artificial Sequence
  Artificially Synthesized Peptide
KWMALESIL

SEQ ID NO: 1219 - protein, 8 aa, Artificial Sequence
  Artificially Synthesized Peptide
KYTMRRLL

SEQ ID NO: 1220 - protein, 8 aa, Artificial Sequence
  Artificially Synthesized Peptide
LFEDNYAL

SEQ ID NO: 1221 - protein, 11 aa, Artificial Sequence
  Artificially Synthesized Peptide
LFEDNYALAVL

SEQ ID NO: 1222 - protein, 9 aa, Artificial Sequence
  Artificially Synthesized Peptide
LFRNPHQAL

SEQ ID NO: 1223 - protein, 10 aa, Artificial Sequence
  Artificially Synthesized Peptide
LFRNPHQALL

SEQ ID NO: 1224 - protein, 8 aa, Artificial Sequence
  Artificially Synthesized Peptide
LIHHNTHL

SEQ ID NO: 1225 - protein, 10 aa, Artificial Sequence
  Artificially Synthesized Peptide
LIHHNTHLCF

SEQ ID NO: 1226 - protein, 9 aa, Artificial Sequence
  Artificially Synthesized Peptide
LIKRRQQKI

SEQ ID NO: 1227 - protein, 8 aa, Artificial Sequence
  Artificially Synthesized Peptide
LIQRNPQL

SEQ ID NO: 1228 - protein, 10 aa, Artificial Sequence
  Artificially Synthesized Peptide
LIQRNPQLCY

SEQ ID NO: 1229 - protein, 9 aa, Artificial Sequence
  Artificially Synthesized Peptide
LLDIDETEY

SEQ ID NO: 1230 - protein, 10 aa, Artificial Sequence
  Artificially Synthesized Peptide
LLEDDDMGDL

SEQ ID NO: 1231 - protein, 8 aa, Artificial Sequence
  Artificially Synthesized Peptide
LLEKGERL

SEQ ID NO: 1232 - protein, 8 aa, Artificial Sequence
  Artificially Synthesized Peptide
LLNWCMQI

SEQ ID NO: 1233 - protein, 11 aa, Artificial Sequence
  Artificially Synthesized Peptide
LLQETELVEPL

SEQ ID NO: 1234 - protein, 10 aa, Artificial Sequence
  Artificially Synthesized Peptide
LLVVVLGVVF

SEQ ID NO: 1235 - protein, 8 aa, Artificial Sequence
  Artificially Synthesized Peptide
LMPYGCLL

SEQ ID NO: 1236 - protein, 9 aa, Artificial Sequence
  Artificially Synthesized Peptide
LMTFGAKPY

SEQ ID NO: 1237 - protein, 9 aa, Artificial Sequence
  Artificially Synthesized Peptide
LTCSPQPEY

SEQ ID NO: 1238 - protein, 10 aa, Artificial Sequence
  Artificially Synthesized Peptide
LTEILKGGVL

SEQ ID NO: 1239 - protein, 11 aa, Artificial Sequence
  Artificially Synthesized Peptide
LTEILKGGVLI

SEQ ID NO: 1240 - protein, 8 aa, Artificial Sequence
  Artificially Synthesized Peptide
LTLQGLGI

SEQ ID NO: 1241 - protein, 10 aa, Artificial Sequence
  Artificially Synthesized Peptide
LTLQGLGISW

SEQ ID NO: 1242 - protein, 11 aa, Artificial Sequence
  Artificially Synthesized Peptide
LTLQGLGISWL

SEQ ID NO: 1243 - protein, 11 aa, Artificial Sequence
  Artificially Synthesized Peptide
LTSIISAVVGI

SEQ ID NO: 1244 - protein, 11 aa, Artificial Sequence
  Artificially Synthesized Peptide
LTSTVQLVTQL

SEQ ID NO: 1245 - protein, 10 aa, Artificial Sequence
  Artificially Synthesized Peptide
LTYLPTNASL

SEQ ID NO: 1246 - protein, 8 aa, Artificial Sequence
  Artificially Synthesized Peptide
LVDAEEYL

SEQ ID NO: 1247 - protein, 11 aa, Artificial Sequence
  Artificially Synthesized Peptide
LVEPLTPSGAM

SEQ ID NO: 1248 - protein, 10 aa, Artificial Sequence
  Artificially Synthesized Peptide
LVKSPNHVKI

SEQ ID NO: 1249 - protein, 8 aa, Artificial Sequence
  Artificially Synthesized Peptide
LVPQQGFF

SEQ ID NO: 1250 - protein, 8 aa, Artificial Sequence
  Artificially Synthesized Peptide
LVSEFSRM

SEQ ID NO: 1251 - protein, 8 aa, Artificial Sequence
  Artificially Synthesized Peptide
LVTQLMPY

SEQ ID NO: 1252 - protein, 11 aa, Artificial Sequence
  Artificially Synthesized Peptide
LVTQLMPYGCL

SEQ ID NO: 1253 - protein, 9 aa, Artificial Sequence
  Artificially Synthesized Peptide
LVTYNTDTF

SEQ ID NO: 1254 - protein, 9 aa, Artificial Sequence
  Artificially Synthesized Peptide
LVVVLGVVF

SEQ ID NO: 1255 - protein, 11 aa, Artificial Sequence
  Artificially Synthesized Peptide
LVVVLGVVFGI

SEQ ID NO: 1256 - protein, 10 aa, Artificial Sequence
  Artificially Synthesized Peptide
LYISAWPDSL

SEQ ID NO: 1257 - protein, 10 aa, Artificial Sequence
  Artificially Synthesized Peptide
MIDSECRPRF

SEQ ID NO: 1258 - protein, 8 aa, Artificial Sequence
  Artificially Synthesized Peptide
MIMVKCWM

SEQ ID NO: 1259 - protein, 9 aa, Artificial Sequence
  Artificially Synthesized Peptide
MIMVKCWMI

SEQ ID NO: 1260 - protein, 8 aa, Artificial Sequence
  Artificially Synthesized Peptide
MTFGAKPY

SEQ ID NO: 1261 - protein, 11 aa, Artificial Sequence
  Artificially Synthesized Peptide
MTFGAKPYDGI

SEQ ID NO: 1262 - protein, 11 aa, Artificial Sequence
  Artificially Synthesized Peptide
NIQEFAGCKKI

SEQ ID NO: 1263 - protein, 9 aa, Artificial Sequence
  Artificially Synthesized Peptide
NLQVIRGRI

SEQ ID NO: 1264 - protein, 10 aa, Artificial Sequence
  Artificially Synthesized Peptide
NLQVIRGRIL

SEQ ID NO: 1265 - protein, 10 aa, Artificial Sequence
  Artificially Synthesized Peptide
NTAPLQPEQL

SEQ ID NO: 1266 - protein, 8 aa, Artificial Sequence
  Artificially Synthesized Peptide
NTDTFESM

SEQ ID NO: 1267 - protein, 10 aa, Artificial Sequence
  Artificially Synthesized Peptide
NTSPKANKEI

SEQ ID NO: 1268 - protein, 11 aa, Artificial Sequence
  Artificially Synthesized Peptide
NTSPKANKEIL

SEQ ID NO: 1269 - protein, 8 aa, Artificial Sequence
  Artificially Synthesized Peptide
NVKIPVAI

SEQ ID NO: 1270 - protein, 11 aa, Artificial Sequence
  Artificially Synthesized Peptide
NVKIPVAIKVL

SEQ ID NO: 1271 - protein, 10 aa, Artificial Sequence
  Artificially Synthesized Peptide
NWCMQIAKGM

SEQ ID NO: 1272 - protein, 8 aa, Artificial Sequence
  Artificially Synthesized Peptide
PICTIDVY

SEQ ID NO: 1273 - protein, 9 aa, Artificial Sequence
  Artificially Synthesized Peptide
PICTIDVYM

SEQ ID NO: 1274 - protein, 10 aa, Artificial Sequence
  Artificially Synthesized Peptide
PICTIDVYMI

SEQ ID NO: 1275 - protein, 11 aa, Artificial Sequence
  Artificially Synthesized Peptide
PICTIDVYMIM

SEQ ID NO: 1276 - protein, 10 aa, Artificial Sequence
  Artificially Synthesized Peptide
PIKWMALESI

SEQ ID NO: 1277 - protein, 11 aa, Artificial Sequence
  Artificially Synthesized Peptide
PIKWMALESIL

SEQ ID NO: 1278 - protein, 11 aa, Artificial Sequence
  Artificially Synthesized Peptide
PINCTHSCVDL

SEQ ID NO: 1279 - protein, 10 aa, Artificial Sequence
  Artificially Synthesized Peptide
PLDSTFYRSL

SEQ ID NO: 1280 - protein, 11 aa, Artificial Sequence
  Artificially Synthesized Peptide
PLDSTFYRSLL

SEQ ID NO: 1281 - protein, 9 aa, Artificial Sequence
  Artificially Synthesized Peptide
PLPSETDGY

SEQ ID NO: 1282 - protein, 10 aa, Artificial Sequence
  Artificially Synthesized Peptide
PLQPEQLQVF

SEQ ID NO: 1283 - protein, 10 aa, Artificial Sequence
  Artificially Synthesized Peptide
PLTCSPQPEY

SEQ ID NO: 1284 - protein, 8 aa, Artificial Sequence
  Artificially Synthesized Peptide
PLTPSGAM

SEQ ID NO: 1285 - protein, 9 aa, Artificial Sequence
  Artificially Synthesized Peptide
PMCKGSRCW

SEQ ID NO: 1286 - protein, 8 aa, Artificial Sequence
  Artificially Synthesized Peptide
PTAENPEY

SEQ ID NO: 1287 - protein, 9 aa, Artificial Sequence
  Artificially Synthesized Peptide
PTAENPEYL

SEQ ID NO: 1288 - protein, 11 aa, Artificial Sequence
  Artificially Synthesized Peptide
PTAENPEYLGL

SEQ ID NO: 1289 - protein, 8 aa, Artificial Sequence
  Artificially Synthesized Peptide
PTHDPSPL

SEQ ID NO: 1290 - protein, 11 aa, Artificial Sequence
  Artificially Synthesized Peptide
PTHDPSPLQRY

SEQ ID NO: 1291 - protein, 8 aa, Artificial Sequence
  Artificially Synthesized Peptide
PTNASLSF

SEQ ID NO: 1292 - protein, 9 aa, Artificial Sequence
  Artificially Synthesized Peptide
PTNASLSFL

SEQ ID NO: 1293 - protein, 10 aa, Artificial Sequence
  Artificially Synthesized Peptide
PTQCVNCSQF

SEQ ID NO: 1294 - protein, 11 aa, Artificial Sequence
  Artificially Synthesized Peptide
PTQCVNCSQFL

SEQ ID NO: 1295 - protein, 10 aa, Artificial Sequence
  Artificially Synthesized Peptide
PVTGASPGGL

SEQ ID NO: 1296 - protein, 10 aa, Artificial Sequence
  Artificially Synthesized Peptide
PYDGIPAREI

SEQ ID NO: 1297 - protein, 9 aa, Artificial Sequence
  Artificially Synthesized Peptide
PYVSRLLGI

SEQ ID NO: 1298 - protein, 11 aa, Artificial Sequence
  Artificially Synthesized Peptide
PYVSRLLGICL

SEQ ID NO: 1299 - protein, 8 aa, Artificial Sequence
  Artificially Synthesized Peptide
QIAKGMSY

SEQ ID NO: 1300 - protein, 9 aa, Artificial Sequence
  Artificially Synthesized Peptide
QIAKGMSYL

SEQ ID NO: 1301 - protein, 9 aa, Artificial Sequence
  Artificially Synthesized Peptide
QLCARGHCW

SEQ ID NO: 1302 - protein, 8 aa, Artificial Sequence
  Artificially Synthesized Peptide
QLCYQDTI

SEQ ID NO: 1303 - protein, 9 aa, Artificial Sequence
  Artificially Synthesized Peptide
QLCYQDTIL

SEQ ID NO: 1304 - protein, 10 aa, Artificial Sequence
  Artificially Synthesized Peptide
QLCYQDTILW

SEQ ID NO: 1305 - protein, 9 aa, Artificial Sequence
  Artificially Synthesized Peptide
QLFEDNYAL

SEQ ID NO: 1306 - protein, 10 aa, Artificial Sequence
  Artificially Synthesized Peptide
QLFRNPHQAL

SEQ ID NO: 1307 - protein, 11 aa, Artificial Sequence
  Artificially Synthesized Peptide
QLFRNPHQALL

SEQ ID NO: 1308 - protein, 8 aa, Artificial Sequence
  Artificially Synthesized Peptide
QLMPYGCL

SEQ ID NO: 1309 - protein, 9 aa, Artificial Sequence
  Artificially Synthesized Peptide
QLMPYGCLL

SEQ ID NO: 1310 - protein, 8 aa, Artificial Sequence
  Artificially Synthesized Peptide
QLQVFETL

SEQ ID NO: 1311 - protein, 11 aa, Artificial Sequence
  Artificially Synthesized Peptide
QLQVFETLEEI

SEQ ID NO: 1312 - protein, 8 aa, Artificial Sequence
  Artificially Synthesized Peptide
QLRSLTEI

SEQ ID NO: 1313 - protein, 9 aa, Artificial Sequence
  Artificially Synthesized Peptide
QLRSLTEIL

SEQ ID NO: 1314 - protein, 9 aa, Artificial Sequence
  Artificially Synthesized Peptide
QLVTQLMPY

SEQ ID NO: 1315 - protein, 10 aa, Artificial Sequence
  Artificially Synthesized Peptide
QMRILKETEL

SEQ ID NO: 1316 - protein, 8 aa, Artificial Sequence
  Artificially Synthesized Peptide
QVCTGTDM

SEQ ID NO: 1317 - protein, 10 aa, Artificial Sequence
  Artificially Synthesized Peptide
QVCTGTDMKL

SEQ ID NO: 1318 - protein, 9 aa, Artificial Sequence
  Artificially Synthesized Peptide
QVFETLEEI

SEQ ID NO: 1319 - protein, 8 aa, Artificial Sequence
  Artificially Synthesized Peptide
QVIRGRIL

SEQ ID NO: 1320 - protein, 9 aa, Artificial Sequence
  Artificially Synthesized Peptide
QVPLQRLRI

SEQ ID NO: 1321 - protein, 10 aa, Artificial Sequence
  Artificially Synthesized Peptide
QVRQVPLQRL

SEQ ID NO: 1322 - protein, 9 aa, Artificial Sequence
  Artificially Synthesized Peptide
QVVQGNLEL

SEQ ID NO: 1323 - protein, 11 aa, Artificial Sequence
  Artificially Synthesized Peptide
QVVQGNLELTY

SEQ ID NO: 1324 - protein, 9 aa, Artificial Sequence
  Artificially Synthesized Peptide
RFRELVSEF

SEQ ID NO: 1325 - protein, 9 aa, Artificial Sequence
  Artificially Synthesized Peptide
RFTHQSDVW

SEQ ID NO: 1326 - protein, 11 aa, Artificial Sequence
  Artificially Synthesized Peptide
RFTHQSDVWSY

SEQ ID NO: 1327 - protein, 10 aa, Artificial Sequence
  Artificially Synthesized Peptide
RFVVIQNEDL

SEQ ID NO: 1328 - protein, 8 aa, Artificial Sequence
  Artificially Synthesized Peptide
RILHNGAY

SEQ ID NO: 1329 - protein, 10 aa, Artificial Sequence
  Artificially Synthesized Peptide
RILHNGAYSL

SEQ ID NO: 1330 - protein, 8 aa, Artificial Sequence
  Artificially Synthesized Peptide
RILKETEL

SEQ ID NO: 1331 - protein, 8 aa, Artificial Sequence
  Artificially Synthesized Peptide
RIVRGTQL

SEQ ID NO: 1332 - protein, 9 aa, Artificial Sequence
  Artificially Synthesized Peptide
RIVRGTQLF

SEQ ID NO: 1333 - protein, 8 aa, Artificial Sequence
  Artificially Synthesized Peptide
RLGSQDLL

SEQ ID NO: 1334 - protein, 10 aa, Artificial Sequence
  Artificially Synthesized Peptide
RLGSQDLLNW

SEQ ID NO: 1335 - protein, 10 aa, Artificial Sequence
  Artificially Synthesized Peptide
RLLDIDETEY

SEQ ID NO: 1336 - protein, 8 aa, Artificial Sequence
  Artificially Synthesized Peptide
RLLQETEL

SEQ ID NO: 1337 - protein, 10 aa, Artificial Sequence
  Artificially Synthesized Peptide
RLPASPETHL

SEQ ID NO: 1338 - protein, 10 aa, Artificial Sequence
  Artificially Synthesized Peptide
RLPQPPICTI

SEQ ID NO: 1339 - protein, 10 aa, Artificial Sequence
  Artificially Synthesized Peptide
RLRIVRGTQL

SEQ ID NO: 1340 - protein, 11 aa, Artificial Sequence
  Artificially Synthesized Peptide
RLRIVRGTQLF

SEQ ID NO: 1341 - protein, 9 aa, Artificial Sequence
  Artificially Synthesized Peptide
RMARDPQRF

SEQ ID NO: 1342 - protein, 8 aa, Artificial Sequence
  Artificially Synthesized Peptide
RVCYGLGM

SEQ ID NO: 1343 - protein, 11 aa, Artificial Sequence
  Artificially Synthesized Peptide
RVCYGLGMEHL

SEQ ID NO: 1344 - protein, 10 aa, Artificial Sequence
  Artificially Synthesized Peptide
RVLQGLPREY

SEQ ID NO: 1345 - protein, 8 aa, Artificial Sequence
  Artificially Synthesized Peptide
RWGLLLAL

SEQ ID NO: 1346 - protein, 9 aa, Artificial Sequence
  Artificially Synthesized Peptide
RWGLLLALL

SEQ ID NO: 1347 - protein, 10 aa, Artificial Sequence
  Artificially Synthesized Peptide
RYSEDPTVPL

SEQ ID NO: 1348 - protein, 9 aa, Artificial Sequence
  Artificially Synthesized Peptide
SIISAVVGI

SEQ ID NO: 1349 - protein, 10 aa, Artificial Sequence
  Artificially Synthesized Peptide
SIISAVVGIL

SEQ ID NO: 1350 - protein, 11 aa, Artificial Sequence
  Artificially Synthesized Peptide
SIISAVVGILL

SEQ ID NO: 1351 - protein, 9 aa, Artificial Sequence
  Artificially Synthesized Peptide
SLAFLPESF

SEQ ID NO: 1352 - protein, 8 aa, Artificial Sequence
  Artificially Synthesized Peptide
SLLEDDDM

SEQ ID NO: 1353 - protein, 11 aa, Artificial Sequence
  Artificially Synthesized Peptide
SLLEDDDMGDL

SEQ ID NO: 1354 - protein, 8 aa, Artificial Sequence
  Artificially Synthesized Peptide
SLPDLSVF

SEQ ID NO: 1355 - protein, 11 aa, Artificial Sequence
  Artificially Synthesized Peptide
SLPDLSVFQNL

SEQ ID NO: 1356 - protein, 10 aa, Artificial Sequence
  Artificially Synthesized Peptide
SLPTHDPSPL

SEQ ID NO: 1357 - protein, 9 aa, Artificial Sequence
  Artificially Synthesized Peptide
SLRELGSGL

SEQ ID NO: 1358 - protein, 11 aa, Artificial Sequence
  Artificially Synthesized Peptide
SLRELGSGLAL

SEQ ID NO: 1359 - protein, 8 aa, Artificial Sequence
  Artificially Synthesized Peptide
SLSFLQDI

SEQ ID NO: 1360 - protein, 11 aa, Artificial Sequence
  Artificially Synthesized Peptide
SLTEILKGGVL

SEQ ID NO: 1361 - protein, 9 aa, Artificial Sequence
  Artificially Synthesized Peptide
SLTLQGLGI

SEQ ID NO: 1362 - protein, 11 aa, Artificial Sequence
  Artificially Synthesized Peptide
SLTLQGLGISW

SEQ ID NO: 1363 - protein, 9 aa, Artificial Sequence
  Artificially Synthesized Peptide
SMPNPEGRY

SEQ ID NO: 1364 - protein, 11 aa, Artificial Sequence
  Artificially Synthesized Peptide
SMPNPEGRYTF

SEQ ID NO: 1365 - protein, 9 aa, Artificial Sequence
  Artificially Synthesized Peptide
STDVGSCTL

SEQ ID NO: 1366 - protein, 8 aa, Artificial Sequence
  Artificially Synthesized Peptide
STFYRSLL

SEQ ID NO: 1367 - protein, 10 aa, Artificial Sequence
  Artificially Synthesized Peptide
STQVCTGTDM

SEQ ID NO: 1368 - protein, 9 aa, Artificial Sequence
  Artificially Synthesized Peptide
STRSGGGDL

SEQ ID NO: 1369 - protein, 11 aa, Artificial Sequence
  Artificially Synthesized Peptide
STRSGGGDLTL

SEQ ID NO: 1370 - protein, 9 aa, Artificial Sequence
  Artificially Synthesized Peptide
STVQLVTQL

SEQ ID NO: 1371 - protein, 10 aa, Artificial Sequence
  Artificially Synthesized Peptide
STVQLVTQLM

SEQ ID NO: 1372 - protein, 9 aa, Artificial Sequence
  Artificially Synthesized Peptide
SVFQNLQVI

SEQ ID NO: 1373 - protein, 8 aa, Artificial Sequence
  Artificially Synthesized Peptide
SWLGLRSL

SEQ ID NO: 1374 - protein, 11 aa, Artificial Sequence
  Artificially Synthesized Peptide
SWLGLRSLREL

SEQ ID NO: 1375 - protein, 9 aa, Artificial Sequence
  Artificially Synthesized Peptide
SYGVTVWEL

SEQ ID NO: 1376 - protein, 10 aa, Artificial Sequence
  Artificially Synthesized Peptide
SYGVTVWELM

SEQ ID NO: 1377 - protein, 8 aa, Artificial Sequence
  Artificially Synthesized Peptide
SYLEDVRL

SEQ ID NO: 1378 - protein, 8 aa, Artificial Sequence
  Artificially Synthesized Peptide
SYMPIWKF

SEQ ID NO: 1379 - protein, 10 aa, Artificial Sequence
  Artificially Synthesized Peptide
TFGAKPYDGI

SEQ ID NO: 1380 - protein, 8 aa, Artificial Sequence
  Artificially Synthesized Peptide
TIDVYMIM

SEQ ID NO: 1381 - protein, 8 aa, Artificial Sequence
  Artificially Synthesized Peptide
TILWKDIF

SEQ ID NO: 1382 - protein, 8 aa, Artificial Sequence
  Artificially Synthesized Peptide
TLEEITGY

SEQ ID NO: 1383 - protein, 9 aa, Artificial Sequence
  Artificially Synthesized Peptide
TLEEITGYL

SEQ ID NO: 1384 - protein, 10 aa, Artificial Sequence
  Artificially Synthesized Peptide
TLEEITGYLY

SEQ ID NO: 1385 - protein, 11 aa, Artificial Sequence
  Artificially Synthesized Peptide
TLEEITGYLYI

SEQ ID NO: 1386 - protein, 8 aa, Artificial Sequence
  Artificially Synthesized Peptide
TLERPKTL

SEQ ID NO: 1387 - protein, 9 aa, Artificial Sequence
  Artificially Synthesized Peptide
TLQGLGISW

SEQ ID NO: 1388 - protein, 10 aa, Artificial Sequence
  Artificially Synthesized Peptide
TLQGLGISWL

SEQ ID NO: 1389 - protein, 11 aa, Artificial Sequence
  Artificially Synthesized Peptide
TMRRLLQETEL

SEQ ID NO: 1390 - protein, 11 aa, Artificial Sequence
  Artificially Synthesized Peptide
TVPLPSETDGY

SEQ ID NO: 1391 - protein, 8 aa, Artificial Sequence
  Artificially Synthesized Peptide
TVPWDQLF

SEQ ID NO: 1392 - protein, 8 aa, Artificial Sequence
  Artificially Synthesized Peptide
TVQLVTQL

SEQ ID NO: 1393 - protein, 9 aa, Artificial Sequence
  Artificially Synthesized Peptide
TVQLVTQLM

SEQ ID NO: 1394 - protein, 11 aa, Artificial Sequence
  Artificially Synthesized Peptide
TVQLVTQLMPY

SEQ ID NO: 1395 - protein, 8 aa, Artificial Sequence
  Artificially Synthesized Peptide
TVWELMTF

SEQ ID NO: 1396 - protein, 8 aa, Artificial Sequence
  Artificially Synthesized Peptide
TVYKGIWI

SEQ ID NO: 1397 - protein, 9 aa, Artificial Sequence
  Artificially Synthesized Peptide
TYLPTNASL

SEQ ID NO: 1398 - protein, 11 aa, Artificial Sequence
  Artificially Synthesized Peptide
TYLPTNASLSF

SEQ ID NO: 1399 - protein, 10 aa, Artificial Sequence
  Artificially Synthesized Peptide
TYNTDTFESM

SEQ ID NO: 1400 - protein, 8 aa, Artificial Sequence
  Artificially Synthesized Peptide
VFDGDLGM

SEQ ID NO: 1401 - protein, 8 aa, Artificial Sequence
  Artificially Synthesized Peptide
VFETLEEI

SEQ ID NO: 1402 - protein, 11 aa, Artificial Sequence
  Artificially Synthesized Peptide
VFETLEEITGY

SEQ ID NO: 1403 - protein, 8 aa, Artificial Sequence
  Artificially Synthesized Peptide
VFQNLQVI

SEQ ID NO: 1404 - protein, 8 aa, Artificial Sequence
  Artificially Synthesized Peptide
VLDNGDPL

SEQ ID NO: 1405 - protein, 11 aa, Artificial Sequence
  Artificially Synthesized Peptide
VLGSGAFGTVY

SEQ ID NO: 1406 - protein, 8 aa, Artificial Sequence
  Artificially Synthesized Peptide
VLGVVFGI

SEQ ID NO: 1407 - protein, 9 aa, Artificial Sequence
  Artificially Synthesized Peptide
VLGVVFGIL

SEQ ID NO: 1408 - protein, 10 aa, Artificial Sequence
  Artificially Synthesized Peptide
VLGVVFGILI

SEQ ID NO: 1409 - protein, 9 aa, Artificial Sequence
  Artificially Synthesized Peptide
VLIQRNPQL

SEQ ID NO: 1410 - protein, 11 aa, Artificial Sequence
  Artificially Synthesized Peptide
VLIQRNPQLCY

SEQ ID NO: 1411 - protein, 9 aa, Artificial Sequence
  Artificially Synthesized Peptide
VLQGLPREY

SEQ ID NO: 1412 - protein, 11 aa, Artificial Sequence
  Artificially Synthesized Peptide
VLVKSPNHVKI

SEQ ID NO: 1413 - protein, 9 aa, Artificial Sequence
  Artificially Synthesized Peptide
VMAGVGSPY

SEQ ID NO: 1414 - protein, 8 aa, Artificial Sequence
  Artificially Synthesized Peptide
VTACPYNY

SEQ ID NO: 1415 - protein, 9 aa, Artificial Sequence
  Artificially Synthesized Peptide
VTACPYNYL

SEQ ID NO: 1416 - protein, 9 aa, Artificial Sequence
  Artificially Synthesized Peptide
VTGASPGGL

SEQ ID NO: 1417 - protein, 10 aa, Artificial Sequence
  Artificially Synthesized Peptide
VTQLMPYGCL

SEQ ID NO: 1418 - protein, 11 aa, Artificial Sequence
  Artificially Synthesized Peptide
VTQLMPYGCLL

SEQ ID NO: 1419 - protein, 9 aa, Artificial Sequence
  Artificially Synthesized Peptide
VTSANIQEF

SEQ ID NO: 1420 - protein, 9 aa, Artificial Sequence
  Artificially Synthesized Peptide
VTVWELMTF

SEQ ID NO: 1421 - protein, 8 aa, Artificial Sequence
  Artificially Synthesized Peptide
VTYNTDTF

SEQ ID NO: 1422 - protein, 11 aa, Artificial Sequence
  Artificially Synthesized Peptide
VTYNTDTFESM

SEQ ID NO: 1423 - protein, 10 aa, Artificial Sequence
  Artificially Synthesized Peptide
VVGILLVVVL

SEQ ID NO: 1424 - protein, 8 aa, Artificial Sequence
  Artificially Synthesized Peptide
VVIQNEDL

SEQ ID NO: 1425 - protein, 8 aa, Artificial Sequence
  Artificially Synthesized Peptide
VVKDVFAF

SEQ ID NO: 1426 - protein, 9 aa, Artificial Sequence
  Artificially Synthesized Peptide
VVLGVVFGI

SEQ ID NO: 1427 - protein, 10 aa, Artificial Sequence
  Artificially Synthesized Peptide
VVLGVVFGIL

SEQ ID NO: 1428 - protein, 11 aa, Artificial Sequence
  Artificially Synthesized Peptide
VVLGVVFGILI

SEQ ID NO: 1429 - protein, 8 aa, Artificial Sequence
  Artificially Synthesized Peptide
VVQGNLEL

SEQ ID NO: 1430 - protein, 10 aa, Artificial Sequence
  Artificially Synthesized Peptide
VVQGNLELTY

SEQ ID NO: 1431 - protein, 11 aa, Artificial Sequence
  Artificially Synthesized Peptide
VVQGNLELTYL

SEQ ID NO: 1432 - protein, 8 aa, Artificial Sequence
  Artificially Synthesized Peptide
VVVLGVVF

SEQ ID NO: 1433 - protein, 10 aa, Artificial Sequence
  Artificially Synthesized Peptide
VVVLGVVFGI

SEQ ID NO: 1434 - protein, 11 aa, Artificial Sequence
  Artificially Synthesized Peptide
VVVLGVVFGIL

SEQ ID NO: 1435 - protein, 9 aa, Artificial Sequence
  Artificially Synthesized Peptide
VWSYGVTVW

SEQ ID NO: 1436 - protein, 11 aa, Artificial Sequence
  Artificially Synthesized Peptide
VWSYGVTVWEL

SEQ ID NO: 1437 - protein, 9 aa, Artificial Sequence
  Artificially Synthesized Peptide
VYMIMVKCW

SEQ ID NO: 1438 - protein, 10 aa, Artificial Sequence
  Artificially Synthesized Peptide
VYMIMVKCWM

SEQ ID NO: 1439 - protein, 11 aa, Artificial Sequence
  Artificially Synthesized Peptide
VYMIMVKCWMI

SEQ ID NO: 1440 - protein, 10 aa, Artificial Sequence
  Artificially Synthesized Peptide
WIPDGENVKI

SEQ ID NO: 1441 - protein, 10 aa, Artificial Sequence
  Artificially Synthesized Peptide
WLGLRSLREL

SEQ ID NO: 1442 - protein, 8 aa, Artificial Sequence
  Artificially Synthesized Peptide
WMALESIL

SEQ ID NO: 1443 - protein, 11 aa, Artificial Sequence
  Artificially Synthesized Peptide
WMIDSECRPRF

SEQ ID NO: 1444 - protein, 9 aa, Artificial Sequence
  Artificially Synthesized Peptide
YISAWPDSL

SEQ ID NO: 1445 - protein, 8 aa, Artificial Sequence
  Artificially Synthesized Peptide
YLPTNASL

SEQ ID NO: 1446 - protein, 10 aa, Artificial Sequence
  Artificially Synthesized Peptide
YLPTNASLSF

SEQ ID NO: 1447 - protein, 11 aa, Artificial Sequence
  Artificially Synthesized Peptide
YLPTNASLSFL

SEQ ID NO: 1448 - protein, 11 aa, Artificial Sequence
  Artificially Synthesized Peptide
YLSTDVGSCTL

SEQ ID NO: 1449 - protein, 8 aa, Artificial Sequence
  Artificially Synthesized Peptide
YLVPQQGF

SEQ ID NO: 1450 - protein, 9 aa, Artificial Sequence
  Artificially Synthesized Peptide
YLVPQQGFF

SEQ ID NO: 1451 - protein, 11 aa, Artificial Sequence
  Artificially Synthesized Peptide
YLYISAWPDSL

SEQ ID NO: 1452 - protein, 8 aa, Artificial Sequence
  Artificially Synthesized Peptide
YMIMVKCW

SEQ ID NO: 1453 - protein, 9 aa, Artificial Sequence
  Artificially Synthesized Peptide
YMIMVKCWM

SEQ ID NO: 1454 - protein, 10 aa, Artificial Sequence
  Artificially Synthesized Peptide
YMIMVKCWMI

SEQ ID NO: 1455 - protein, 10 aa, Artificial Sequence
  Artificially Synthesized Peptide
YVMAGVGSPY

SEQ ID NO: 1456 - protein, 8 aa, Artificial Sequence
  Artificially Synthesized Peptide
YVNARHCL

SEQ ID NO: 1457 - protein, 8 aa, Artificial Sequence
  Artificially Synthesized Peptide
YVSRLLGI

SEQ ID NO: 1458 - protein, 10 aa, Artificial Sequence
  Artificially Synthesized Peptide
YVSRLLGICL

SEQ ID NO: 1459 - protein, 8 aa, Artificial Sequence
  Artificially Synthesized Peptide
APGAGGMV

SEQ ID NO: 1460 - protein, 8 aa, Artificial Sequence
  Artificially Synthesized Peptide
APLQPEQL

SEQ ID NO: 1461 - protein, 10 aa, Artificial Sequence
  Artificially Synthesized Peptide
APLQPEQLQV

SEQ ID NO: 1462 - protein, 11 aa, Artificial Sequence
  Artificially Synthesized Peptide
APLQPEQLQVF

SEQ ID NO: 1463 - protein, 11 aa, Artificial Sequence
  Artificially Synthesized Peptide
APLTCSPQPEY

SEQ ID NO: 1464 - protein, 9 aa, Artificial Sequence
  Artificially Synthesized Peptide
APQPHPPPA

SEQ ID NO: 1465 - protein, 10 aa, Artificial Sequence
  Artificially Synthesized Peptide
APQPHPPPAF

SEQ ID NO: 1466 - protein, 10 aa, Artificial Sequence
  Artificially Synthesized Peptide
APSEGAGSDV

SEQ ID NO: 1467 - protein, 11 aa, Artificial Sequence
  Artificially Synthesized Peptide
APSEGAGSDVF

SEQ ID NO: 1468 - protein, 10 aa, Artificial Sequence
  Artificially Synthesized Peptide
CPAEQRASPL

SEQ ID NO: 1469 - protein, 8 aa, Artificial Sequence
  Artificially Synthesized Peptide
CPDPAPGA

SEQ ID NO: 1470 - protein, 11 aa, Artificial Sequence
  Artificially Synthesized Peptide
CPDPAPGAGGM

SEQ ID NO: 1471 - protein, 10 aa, Artificial Sequence
  Artificially Synthesized Peptide
CPINCTHSCV

SEQ ID NO: 1472 - protein, 8 aa, Artificial Sequence
  Artificially Synthesized Peptide
CPLHNQEV

SEQ ID NO: 1473 - protein, 10 aa, Artificial Sequence
  Artificially Synthesized Peptide
CPLHNQEVTA

SEQ ID NO: 1474 - protein, 9 aa, Artificial Sequence
  Artificially Synthesized Peptide
CPSGVKPDL

SEQ ID NO: 1475 - protein, 11 aa, Artificial Sequence
  Artificially Synthesized Peptide
CPSGVKPDLSY

SEQ ID NO: 1476 - protein, 10 aa, Artificial Sequence
  Artificially Synthesized Peptide
CPYNYLSTDV

SEQ ID NO: 1477 - protein, 9 aa, Artificial Sequence
  Artificially Synthesized Peptide
DPAPGAGGM

SEQ ID NO: 1478 - protein, 10 aa, Artificial Sequence
  Artificially Synthesized Peptide
DPAPGAGGMV

SEQ ID NO: 1479 - protein, 9 aa, Artificial Sequence
  Artificially Synthesized Peptide
DPASNTAPL

SEQ ID NO: 1480 - protein, 9 aa, Artificial Sequence
  Artificially Synthesized Peptide
DPLNNTTPV

SEQ ID NO: 1481 - protein, 8 aa, Artificial Sequence
  Artificially Synthesized Peptide
DPQRFVVI

SEQ ID NO: 1482 - protein, 8 aa, Artificial Sequence
  Artificially Synthesized Peptide
DPSPLQRY

SEQ ID NO: 1483 - protein, 8 aa, Artificial Sequence
  Artificially Synthesized Peptide
EPLTPSGA

SEQ ID NO: 1484 - protein, 9 aa, Artificial Sequence
  Artificially Synthesized Peptide
EPLTPSGAM

SEQ ID NO: 1485 - protein, 10 aa, Artificial Sequence
  Artificially Synthesized Peptide
GPASPLDSTF

SEQ ID NO: 1486 - protein, 11 aa, Artificial Sequence
  Artificially Synthesized Peptide
GPASPLDSTFY

SEQ ID NO: 1487 - protein, 8 aa, Artificial Sequence
  Artificially Synthesized Peptide
GPEADQCV

SEQ ID NO: 1488 - protein, 9 aa, Artificial Sequence
  Artificially Synthesized Peptide
GPEADQCVA

SEQ ID NO: 1489 - protein, 11 aa, Artificial Sequence
  Artificially Synthesized Peptide
GPEADQCVACA

SEQ ID NO: 1490 - protein, 8 aa, Artificial Sequence
  Artificially Synthesized Peptide
GPGPTQCV

SEQ ID NO: 1491 - protein, 8 aa, Artificial Sequence
  Artificially Synthesized Peptide
GPKHSDCL

SEQ ID NO: 1492 - protein, 9 aa, Artificial Sequence
  Artificially Synthesized Peptide
GPKHSDCLA

SEQ ID NO: 1493 - protein, 11 aa, Artificial Sequence
  Artificially Synthesized Peptide
GPKHSDCLACL

SEQ ID NO: 1494 - protein, 9 aa, Artificial Sequence
  Artificially Synthesized Peptide
GPLPAARPA

SEQ ID NO: 1495 - protein, 11 aa, Artificial Sequence
  Artificially Synthesized Peptide
GPLPAARPAGA

SEQ ID NO: 1496 - protein, 11 aa, Artificial Sequence
  Artificially Synthesized Peptide
GPTQCVNCSQF

SEQ ID NO: 1497 - protein, 11 aa, Artificial Sequence
  Artificially Synthesized Peptide
HPECQPQNGSV

SEQ ID NO: 1498 - protein, 9 aa, Artificial Sequence
  Artificially Synthesized Peptide
HPPPAFSPA

SEQ ID NO: 1499 - protein, 10 aa, Artificial Sequence
  Artificially Synthesized Peptide
HPPPAFSPAF

SEQ ID NO: 1500 - protein, 9 aa, Artificial Sequence
  Artificially Synthesized Peptide
IPAREIPDL

SEQ ID NO: 1501 - protein, 10 aa, Artificial Sequence
  Artificially Synthesized Peptide
IPAREIPDLL

SEQ ID NO: 1502 - protein, 9 aa, Artificial Sequence
  Artificially Synthesized Peptide
IPDGENVKI

SEQ ID NO: 1503 - protein, 11 aa, Artificial Sequence
  Artificially Synthesized Peptide
IPDGENVKIPV

SEQ ID NO: 1504 - protein, 11 aa, Artificial Sequence
  Artificially Synthesized Peptide
IPDLLEKGERL

SEQ ID NO: 1505 - protein, 8 aa, Artificial Sequence
  Artificially Synthesized Peptide
IPVAIKVL

SEQ ID NO: 1506 - protein, 8 aa, Artificial Sequence
  Artificially Synthesized Peptide
KPCARVCY

SEQ ID NO: 1507 - protein, 10 aa, Artificial Sequence
  Artificially Synthesized Peptide
KPCARVCYGL

SEQ ID NO: 1508 - protein, 9 aa, Artificial Sequence
  Artificially Synthesized Peptide
KPDLSYMPI

SEQ ID NO: 1509 - protein, 10 aa, Artificial Sequence
  Artificially Synthesized Peptide
KPDLSYMPIW

SEQ ID NO: 1510 - protein, 8 aa, Artificial Sequence
  Artificially Synthesized Peptide
KPYDGIPA

SEQ ID NO: 1511 - protein, 11 aa, Artificial Sequence
  Artificially Synthesized Peptide
KPYDGIPAREI

SEQ ID NO: 1512 - protein, 9 aa, Artificial Sequence
  Artificially Synthesized Peptide
LPAARPAGA

SEQ ID NO: 1513 - protein, 11 aa, Artificial Sequence
  Artificially Synthesized Peptide
LPAARPAGATL

SEQ ID NO: 1514 - protein, 9 aa, Artificial Sequence
  Artificially Synthesized Peptide
LPASPETHL

SEQ ID NO: 1515 - protein, 11 aa, Artificial Sequence
  Artificially Synthesized Peptide
LPASPETHLDM

SEQ ID NO: 1516 - protein, 10 aa, Artificial Sequence
  Artificially Synthesized Peptide
LPDLSVFQNL

SEQ ID NO: 1517 - protein, 10 aa, Artificial Sequence
  Artificially Synthesized Peptide
LPESFDGDPA

SEQ ID NO: 1518 - protein, 10 aa, Artificial Sequence
  Artificially Synthesized Peptide
LPPGAASTQV

SEQ ID NO: 1519 - protein, 9 aa, Artificial Sequence
  Artificially Synthesized Peptide
LPQPPICTI

SEQ ID NO: 1520 - protein, 11 aa, Artificial Sequence
  Artificially Synthesized Peptide
LPQPPICTIDV

SEQ ID NO: 1521 - protein, 8 aa, Artificial Sequence
  Artificially Synthesized Peptide
LPREYVNA

SEQ ID NO: 1522 - protein, 8 aa, Artificial Sequence
  Artificially Synthesized Peptide
LPSETDGY

SEQ ID NO: 1523 - protein, 9 aa, Artificial Sequence
  Artificially Synthesized Peptide
LPSETDGYV

SEQ ID NO: 1524 - protein, 10 aa, Artificial Sequence
  Artificially Synthesized Peptide
LPSETDGYVA

SEQ ID NO: 1525 - protein, 11 aa, Artificial Sequence
  Artificially Synthesized Peptide
LPTDCCHEQCA

SEQ ID NO: 1526 - protein, 9 aa, Artificial Sequence
  Artificially Synthesized Peptide
LPTHDPSPL

SEQ ID NO: 1527 - protein, 9 aa, Artificial Sequence
  Artificially Synthesized Peptide
LPTNASLSF

SEQ ID NO: 1528 - protein, 10 aa, Artificial Sequence
  Artificially Synthesized Peptide
LPTNASLSFL

SEQ ID NO: 1529 - protein, 8 aa, Artificial Sequence
  Artificially Synthesized Peptide
MPNPEGRY

SEQ ID NO: 1530 - protein, 10 aa, Artificial Sequence
  Artificially Synthesized Peptide
MPNPEGRYTF

SEQ ID NO: 1531 - protein, 9 aa, Artificial Sequence
  Artificially Synthesized Peptide
MPNQAQMRI

SEQ ID NO: 1532 - protein, 10 aa, Artificial Sequence
  Artificially Synthesized Peptide
MPNQAQMRIL

SEQ ID NO: 1533 - protein, 10 aa, Artificial Sequence
  Artificially Synthesized Peptide
MPYGCLLDHV

SEQ ID NO: 1534 - protein, 8 aa, Artificial Sequence
  Artificially Synthesized Peptide
NPEGRYTF

SEQ ID NO: 1535 - protein, 10 aa, Artificial Sequence
  Artificially Synthesized Peptide
NPEGRYTFGA

SEQ ID NO: 1536 - protein, 9 aa, Artificial Sequence
  Artificially Synthesized Peptide
NPEYLGLDV

SEQ ID NO: 1537 - protein, 11 aa, Artificial Sequence
  Artificially Synthesized Peptide
NPEYLGLDVPV

SEQ ID NO: 1538 - protein, 11 aa, Artificial Sequence
  Artificially Synthesized Peptide
NPEYLTPQGGA

SEQ ID NO: 1539 - protein, 10 aa, Artificial Sequence
  Artificially Synthesized Peptide
NPHQALLHTA

SEQ ID NO: 1540 - protein, 10 aa, Artificial Sequence
  Artificially Synthesized Peptide
NPQLCYQDTI

SEQ ID NO: 1541 - protein, 11 aa, Artificial Sequence
  Artificially Synthesized Peptide
NPQLCYQDTIL

SEQ ID NO: 1542 - protein, 8 aa, Artificial Sequence
  Artificially Synthesized Peptide
PPAFSPAF

SEQ ID NO: 1543 - protein, 11 aa, Artificial Sequence
  Artificially Synthesized Peptide
PPAFSPAFDNL

SEQ ID NO: 1544 - protein, 11 aa, Artificial Sequence
  Artificially Synthesized Peptide
PPERGAPPSTF

SEQ ID NO: 1545 - protein, 9 aa, Artificial Sequence
  Artificially Synthesized Peptide
PPGAASTQV

SEQ ID NO: 1546 - protein, 8 aa, Artificial Sequence
  Artificially Synthesized Peptide
PPICTIDV

SEQ ID NO: 1547 - protein, 9 aa, Artificial Sequence
  Artificially Synthesized Peptide
PPICTIDVY

SEQ ID NO: 1548 - protein, 10 aa, Artificial Sequence
  Artificially Synthesized Peptide
PPICTIDVYM

SEQ ID NO: 1549 - protein, 11 aa, Artificial Sequence
  Artificially Synthesized Peptide
PPICTIDVYMI

SEQ ID NO: 1550 - protein, 8 aa, Artificial Sequence
  Artificially Synthesized Peptide
PPPAFSPA

SEQ ID NO: 1551 - protein, 9 aa, Artificial Sequence
  Artificially Synthesized Peptide
PPPAFSPAF

SEQ ID NO: 1552 - protein, 9 aa, Artificial Sequence
  Artificially Synthesized Peptide
PPSPREGPL

SEQ ID NO: 1553 - protein, 11 aa, Artificial Sequence
  Artificially Synthesized Peptide
PPSPREGPLPA

SEQ ID NO: 1554 - protein, 11 aa, Artificial Sequence
  Artificially Synthesized Peptide
PPSTFKGTPTA

SEQ ID NO: 1555 - protein, 8 aa, Artificial Sequence
  Artificially Synthesized Peptide
QPEQLQVF

SEQ ID NO: 1556 - protein, 11 aa, Artificial Sequence
  Artificially Synthesized Peptide
QPEQLQVFETL

SEQ ID NO: 1557 - protein, 10 aa, Artificial Sequence
  Artificially Synthesized Peptide
QPEYVNQPDV

SEQ ID NO: 1558 - protein, 8 aa, Artificial Sequence
  Artificially Synthesized Peptide
QPHPPPAF

SEQ ID NO: 1559 - protein, 11 aa, Artificial Sequence
  Artificially Synthesized Peptide
QPHPPPAFSPA

SEQ ID NO: 1560 - protein, 9 aa, Artificial Sequence
  Artificially Synthesized Peptide
QPPICTIDV

SEQ ID NO: 1561 - protein, 10 aa, Artificial Sequence
  Artificially Synthesized Peptide
QPPICTIDVY

SEQ ID NO: 1562 - protein, 11 aa, Artificial Sequence
  Artificially Synthesized Peptide
QPPICTIDVYM

SEQ ID NO: 1563 - protein, 10 aa, Artificial Sequence
  Artificially Synthesized Peptide
QPPSPREGPL

SEQ ID NO: 1564 - protein, 10 aa, Artificial Sequence
  Artificially Synthesized Peptide
QPQNGSVTCF

SEQ ID NO: 1565 - protein, 11 aa, Artificial Sequence
  Artificially Synthesized Peptide
RPEDECVGEGL

SEQ ID NO: 1566 - protein, 8 aa, Artificial Sequence
  Artificially Synthesized Peptide
RPRFRELV

SEQ ID NO: 1567 - protein, 11 aa, Artificial Sequence
  Artificially Synthesized Peptide
RPRFRELVSEF

SEQ ID NO: 1568 - protein, 8 aa, Artificial Sequence
  Artificially Synthesized Peptide
SPAFDNLY

SEQ ID NO: 1569 - protein, 9 aa, Artificial Sequence
  Artificially Synthesized Peptide
SPAFDNLYY

SEQ ID NO: 1570 - protein, 10 aa, Artificial Sequence
  Artificially Synthesized Peptide
SPAFDNLYYW

SEQ ID NO: 1571 - protein, 8 aa, Artificial Sequence
  Artificially Synthesized Peptide
SPETHLDM

SEQ ID NO: 1572 - protein, 9 aa, Artificial Sequence
  Artificially Synthesized Peptide
SPETHLDML

SEQ ID NO: 1573 - protein, 8 aa, Artificial Sequence
  Artificially Synthesized Peptide
SPGGLREL

SEQ ID NO: 1574 - protein, 10 aa, Artificial Sequence
  Artificially Synthesized Peptide
SPGGLRELQL

SEQ ID NO: 1575 - protein, 8 aa, Artificial Sequence
  Artificially Synthesized Peptide
SPGKNGVV

SEQ ID NO: 1576 - protein, 11 aa, Artificial Sequence
  Artificially Synthesized Peptide
SPGKNGVVKDV

SEQ ID NO: 1577 - protein, 8 aa, Artificial Sequence
  Artificially Synthesized Peptide
SPKANKEI

SEQ ID NO: 1578 - protein, 9 aa, Artificial Sequence
  Artificially Synthesized Peptide
SPKANKEIL

SEQ ID NO: 1579 - protein, 9 aa, Artificial Sequence
  Artificially Synthesized Peptide
SPLAPSEGA

SEQ ID NO: 1580 - protein, 8 aa, Artificial Sequence
  Artificially Synthesized Peptide
SPLDSTFY

SEQ ID NO: 1581 - protein, 11 aa, Artificial Sequence
  Artificially Synthesized Peptide
SPLDSTFYRSL

SEQ ID NO: 1582 - protein, 9 aa, Artificial Sequence
  Artificially Synthesized Peptide
SPLTSIISA

SEQ ID NO: 1583 - protein, 10 aa, Artificial Sequence
  Artificially Synthesized Peptide
SPLTSIISAV

SEQ ID NO: 1584 - protein, 11 aa, Artificial Sequence
  Artificially Synthesized Peptide
SPLTSIISAVV

SEQ ID NO: 1585 - protein, 10 aa, Artificial Sequence
  Artificially Synthesized Peptide
SPMCKGSRCW

SEQ ID NO: 1586 - protein, 10 aa, Artificial Sequence
  Artificially Synthesized Peptide
SPNHVKITDF

SEQ ID NO: 1587 - protein, 9 aa, Artificial Sequence
  Artificially Synthesized Peptide
SPREGPLPA

SEQ ID NO: 1588 - protein, 10 aa, Artificial Sequence
  Artificially Synthesized Peptide
SPREGPLPAA

SEQ ID NO: 1589 - protein, 8 aa, Artificial Sequence
  Artificially Synthesized Peptide
SPYVSRLL

SEQ ID NO: 1590 - protein, 10 aa, Artificial Sequence
  Artificially Synthesized Peptide
SPYVSRLLGI

SEQ ID NO: 1591 - protein, 10 aa, Artificial Sequence
  Artificially Synthesized Peptide
TPSGAMPNQA

SEQ ID NO: 1592 - protein, 9 aa, Artificial Sequence
  Artificially Synthesized Peptide
TPTAENPEY

SEQ ID NO: 1593 - protein, 10 aa, Artificial Sequence
  Artificially Synthesized Peptide
TPTAENPEYL

SEQ ID NO: 1594 - protein, 11 aa, Artificial Sequence
  Artificially Synthesized Peptide
TPVTGASPGGL

SEQ ID NO: 1595 - protein, 8 aa, Artificial Sequence
  Artificially Synthesized Peptide
VPIKWMAL

SEQ ID NO: 1596 - protein, 11 aa, Artificial Sequence
  Artificially Synthesized Peptide
VPIKWMALESI

SEQ ID NO: 1597 - protein, 10 aa, Artificial Sequence
  Artificially Synthesized Peptide
VPLPSETDGY

SEQ ID NO: 1598 - protein, 11 aa, Artificial Sequence
  Artificially Synthesized Peptide
VPLPSETDGYV

SEQ ID NO: 1599 - protein, 8 aa, Artificial Sequence
  Artificially Synthesized Peptide
VPLQRLRI

SEQ ID NO: 1600 - protein, 9 aa, Artificial Sequence
  Artificially Synthesized Peptide
VPLQRLRIV

SEQ ID NO: 1601 - protein, 8 aa, Artificial Sequence
  Artificially Synthesized Peptide
WPDSLPDL

SEQ ID NO: 1602 - protein, 10 aa, Artificial Sequence
  Artificially Synthesized Peptide
WPDSLPDLSV

SEQ ID NO: 1603 - protein, 11 aa, Artificial Sequence
  Artificially Synthesized Peptide
WPDSLPDLSVF

SEQ ID NO: 1604 - protein, 10 aa, Artificial Sequence
  Artificially Synthesized Peptide
AHNQVRQVPL

SEQ ID NO: 1605 - protein, 8 aa, Artificial Sequence
  Artificially Synthesized Peptide
AHYKDPPF

SEQ ID NO: 1606 - protein, 11 aa, Artificial Sequence
  Artificially Synthesized Peptide
ARCPSGVKPDL

SEQ ID NO: 1607 - protein, 10 aa, Artificial Sequence
  Artificially Synthesized Peptide
ARDPQRFVVI

SEQ ID NO: 1608 - protein, 8 aa, Artificial Sequence
  Artificially Synthesized Peptide
AREIPDLL

SEQ ID NO: 1609 - protein, 11 aa, Artificial Sequence
  Artificially Synthesized Peptide
ARLLDIDETEY

SEQ ID NO: 1610 - protein, 8 aa, Artificial Sequence
  Artificially Synthesized Peptide
ARPAGATL

SEQ ID NO: 1611 - protein, 9 aa, Artificial Sequence
  Artificially Synthesized Peptide
ARVCYGLGM

SEQ ID NO: 1612 - protein, 11 aa, Artificial Sequence
  Artificially Synthesized Peptide
CHQLCARGHCW

SEQ ID NO: 1613 - protein, 8 aa, Artificial Sequence
  Artificially Synthesized Peptide
CKKIFGSL

SEQ ID NO: 1614 - protein, 10 aa, Artificial Sequence
  Artificially Synthesized Peptide
CKKIFGSLAF

SEQ ID NO: 1615 - protein, 11 aa, Artificial Sequence
  Artificially Synthesized Peptide
CKKIFGSLAFL

SEQ ID NO: 1616 - protein, 8 aa, Artificial Sequence
  Artificially Synthesized Peptide
CRPRFREL

SEQ ID NO: 1617 - protein, 11 aa, Artificial Sequence
  Artificially Synthesized Peptide
CRVLQGLPREY

SEQ ID NO: 1618 - protein, 9 aa, Artificial Sequence
  Artificially Synthesized Peptide
CRWGLLLAL

SEQ ID NO: 1619 - protein, 10 aa, Artificial Sequence
  Artificially Synthesized Peptide
CRWGLLLALL

SEQ ID NO: 1620 - protein, 10 aa, Artificial Sequence
  Artificially Synthesized Peptide
DHVRENRGRL

SEQ ID NO: 1621 - protein, 11 aa, Artificial Sequence
  Artificially Synthesized Peptide
EKGERLPQPPI

SEQ ID NO: 1622 - protein, 9 aa, Artificial Sequence
  Artificially Synthesized Peptide
ERGAPPSTF

SEQ ID NO: 1623 - protein, 8 aa, Artificial Sequence
  Artificially Synthesized Peptide
ERLPQPPI

SEQ ID NO: 1624 - protein, 11 aa, Artificial Sequence
  Artificially Synthesized Peptide
ERLPQPPICTI

SEQ ID NO: 1625 - protein, 9 aa, Artificial Sequence
  Artificially Synthesized Peptide
FHKNNQLAL

SEQ ID NO: 1626 - protein, 11 aa, Artificial Sequence
  Artificially Synthesized Peptide
FHKNNQLALTL

SEQ ID NO: 1627 - protein, 8 aa, Artificial Sequence
  Artificially Synthesized Peptide
FRELVSEF

SEQ ID NO: 1628 - protein, 11 aa, Artificial Sequence
  Artificially Synthesized Peptide
FRELVSEFSRM

SEQ ID NO: 1629 - protein, 8 aa, Artificial Sequence
  Artificially Synthesized Peptide
FRNPHQAL

SEQ ID NO: 1630 - protein, 9 aa, Artificial Sequence
  Artificially Synthesized Peptide
FRNPHQALL

SEQ ID NO: 1631 - protein, 10 aa, Artificial Sequence
  Artificially Synthesized Peptide
GKNGVVKDVF

SEQ ID NO: 1632 - protein, 8 aa, Artificial Sequence
  Artificially Synthesized Peptide
GKVPIKWM

SEQ ID NO: 1633 - protein, 10 aa, Artificial Sequence
  Artificially Synthesized Peptide
GKVPIKWMAL

SEQ ID NO: 1634 - protein, 9 aa, Artificial Sequence
  Artificially Synthesized Peptide
GRILHNGAY

SEQ ID NO: 1635 - protein, 11 aa, Artificial Sequence
  Artificially Synthesized Peptide
GRILHNGAYSL

SEQ ID NO: 1636 - protein, 8 aa, Artificial Sequence
  Artificially Synthesized Peptide
GRLGSQDL

SEQ ID NO: 1637 - protein, 9 aa, Artificial Sequence
  Artificially Synthesized Peptide
GRLGSQDLL

SEQ ID NO: 1638 - protein, 11 aa, Artificial Sequence
  Artificially Synthesized Peptide
GRLGSQDLLNW

SEQ ID NO: 1639 - protein, 8 aa, Artificial Sequence
  Artificially Synthesized Peptide
HHNTHLCF

SEQ ID NO: 1640 - protein, 8 aa, Artificial Sequence
  Artificially Synthesized Peptide
HKNNQLAL

SEQ ID NO: 1641 - protein, 10 aa, Artificial Sequence
  Artificially Synthesized Peptide
HKNNQLALTL

SEQ ID NO: 1642 - protein, 11 aa, Artificial Sequence
  Artificially Synthesized Peptide
HKNNQLALTLI

SEQ ID NO: 1643 - protein, 10 aa, Artificial Sequence
  Artificially Synthesized Peptide
HRDLAARNVL

SEQ ID NO: 1644 - protein, 9 aa, Artificial Sequence
  Artificially Synthesized Peptide
IHHNTHLCF

SEQ ID NO: 1645 - protein, 8 aa, Artificial Sequence
  Artificially Synthesized Peptide
IKRRQQKI

SEQ ID NO: 1646 - protein, 11 aa, Artificial Sequence
  Artificially Synthesized Peptide
IKRRQQKIRKY

SEQ ID NO: 1647 - protein, 9 aa, Artificial Sequence
  Artificially Synthesized Peptide
IKWMALESI

SEQ ID NO: 1648 - protein, 10 aa, Artificial Sequence
  Artificially Synthesized Peptide
IKWMALESIL

SEQ ID NO: 1649 - protein, 11 aa, Artificial Sequence
  Artificially Synthesized Peptide
IRGRILHNGAY

SEQ ID NO: 1650 - protein, 9 aa, Artificial Sequence
  Artificially Synthesized Peptide
IRKYTMRRL

SEQ ID NO: 1651 - protein, 10 aa, Artificial Sequence
  Artificially Synthesized Peptide
IRKYTMRRLL

SEQ ID NO: 1652 - protein, 9 aa, Artificial Sequence
  Artificially Synthesized Peptide
KHSDCLACL

SEQ ID NO: 1653 - protein, 11 aa, Artificial Sequence
  Artificially Synthesized Peptide
KHSDCLACLHF

SEQ ID NO: 1654 - protein, 9 aa, Artificial Sequence
  Artificially Synthesized Peptide
KKIFGSLAF

SEQ ID NO: 1655 - protein, 10 aa, Artificial Sequence
  Artificially Synthesized Peptide
KKIFGSLAFL

SEQ ID NO: 1656 - protein, 10 aa, Artificial Sequence
  Artificially Synthesized Peptide
KRRQQKIRKY

SEQ ID NO: 1657 - protein, 9 aa, Artificial Sequence
  Artificially Synthesized Peptide
LHCPALVTY

SEQ ID NO: 1658 - protein, 8 aa, Artificial Sequence
  Artificially Synthesized Peptide
LHFNHSGI

SEQ ID NO: 1659 - protein, 11 aa, Artificial Sequence
  Artificially Synthesized Peptide
LHFNHSGICEL

SEQ ID NO: 1660 - protein, 8 aa, Artificial Sequence
  Artificially Synthesized Peptide
LHNGAYSL

SEQ ID NO: 1661 - protein, 10 aa, Artificial Sequence
  Artificially Synthesized Peptide
LHNGAYSLTL

SEQ ID NO: 1662 - protein, 8 aa, Artificial Sequence
  Artificially Synthesized Peptide
LRELGSGL

SEQ ID NO: 1663 - protein, 10 aa, Artificial Sequence
  Artificially Synthesized Peptide
LRELGSGLAL

SEQ ID NO: 1664 - protein, 11 aa, Artificial Sequence
  Artificially Synthesized Peptide
LRELGSGLALI

SEQ ID NO: 1665 - protein, 9 aa, Artificial Sequence
  Artificially Synthesized Peptide
LRELQLRSL

SEQ ID NO: 1666 - protein, 9 aa, Artificial Sequence
  Artificially Synthesized Peptide
LRIVRGTQL

SEQ ID NO: 1667 - protein, 10 aa, Artificial Sequence
  Artificially Synthesized Peptide
LRIVRGTQLF

SEQ ID NO: 1668 - protein, 11 aa, Artificial Sequence
  Artificially Synthesized Peptide
LRLPASPETHL

SEQ ID NO: 1669 - protein, 11 aa, Artificial Sequence
  Artificially Synthesized Peptide
LRSLRELGSGL

SEQ ID NO: 1670 - protein, 8 aa, Artificial Sequence
  Artificially Synthesized Peptide
LRSLTEIL

SEQ ID NO: 1671 - protein, 9 aa, Artificial Sequence
  Artificially Synthesized Peptide
MRILKETEL

SEQ ID NO: 1672 - protein, 10 aa, Artificial Sequence
  Artificially Synthesized Peptide
MRRLLQETEL

SEQ ID NO: 1673 - protein, 8 aa, Artificial Sequence
  Artificially Synthesized Peptide
NHSGICEL

SEQ ID NO: 1674 - protein, 8 aa, Artificial Sequence
  Artificially Synthesized Peptide
NHVKITDF

SEQ ID NO: 1675 - protein, 10 aa, Artificial Sequence
  Artificially Synthesized Peptide
NHVKITDFGL

SEQ ID NO: 1676 - protein, 9 aa, Artificial Sequence
  Artificially Synthesized Peptide
NKEILDEAY

SEQ ID NO: 1677 - protein, 11 aa, Artificial Sequence
  Artificially Synthesized Peptide
NKEILDEAYVM

SEQ ID NO: 1678 - protein, 10 aa, Artificial Sequence
  Artificially Synthesized Peptide
NRGRLGSQDL

SEQ ID NO: 1679 - protein, 11 aa, Artificial Sequence
  Artificially Synthesized Peptide
NRGRLGSQDLL

SEQ ID NO: 1680 - protein, 11 aa, Artificial Sequence
  Artificially Synthesized Peptide
PHPPPAFSPAF

SEQ ID NO: 1681 - protein, 8 aa, Artificial Sequence
  Artificially Synthesized Peptide
PKANKEIL

SEQ ID NO: 1682 - protein, 10 aa, Artificial Sequence
  Artificially Synthesized Peptide
PKHSDCLACL

SEQ ID NO: 1683 - protein, 11 aa, Artificial Sequence
  Artificially Synthesized Peptide
PREYVNARHCL

SEQ ID NO: 1684 - protein, 10 aa, Artificial Sequence
  Artificially Synthesized Peptide
PRFRELVSEF

SEQ ID NO: 1685 - protein, 8 aa, Artificial Sequence
  Artificially Synthesized Peptide
QKIRKYTM

SEQ ID NO: 1686 - protein, 11 aa, Artificial Sequence
  Artificially Synthesized Peptide
QKIRKYTMRRL

SEQ ID NO: 1687 - protein, 9 aa, Artificial Sequence
  Artificially Synthesized Peptide
QRASPLTSI

SEQ ID NO: 1688 - protein, 10 aa, Artificial Sequence
  Artificially Synthesized Peptide
QRASPLTSII

SEQ ID NO: 1689 - protein, 11 aa, Artificial Sequence
  Artificially Synthesized Peptide
QRFVVIQNEDL

SEQ ID NO: 1690 - protein, 11 aa, Artificial Sequence
  Artificially Synthesized Peptide
QRLRIVRGTQL

SEQ ID NO: 1691 - protein, 8 aa, Artificial Sequence
  Artificially Synthesized Peptide
QRNPQLCY

SEQ ID NO: 1692 - protein, 11 aa, Artificial Sequence
  Artificially Synthesized Peptide
QRYSEDPTVPL

SEQ ID NO: 1693 - protein, 11 aa, Artificial Sequence
  Artificially Synthesized Peptide
RKVKVLGSGAF

SEQ ID NO: 1694 - protein, 8 aa, Artificial Sequence
  Artificially Synthesized Peptide
RKYTMRRL

SEQ ID NO: 1695 - protein, 9 aa, Artificial Sequence
  Artificially Synthesized Peptide
RKYTMRRLL

SEQ ID NO: 1696 - protein, 10 aa, Artificial Sequence
  Artificially Synthesized Peptide
RRFTHQSDVW

SEQ ID NO: 1697 - protein, 9 aa, Artificial Sequence
  Artificially Synthesized Peptide
RRLLQETEL

SEQ ID NO: 1698 - protein, 9 aa, Artificial Sequence
  Artificially Synthesized Peptide
RRQQKIRKY

SEQ ID NO: 1699 - protein, 11 aa, Artificial Sequence
  Artificially Synthesized Peptide
RRQQKIRKYTM

SEQ ID NO: 1700 - protein, 11 aa, Artificial Sequence
  Artificially Synthesized Peptide
RRRFTHQSDVW

SEQ ID NO: 1701 - protein, 9 aa, Artificial Sequence
  Artificially Synthesized Peptide
SKPCARVCY

SEQ ID NO: 1702 - protein, 11 aa, Artificial Sequence
  Artificially Synthesized Peptide
SKPCARVCYGL

SEQ ID NO: 1703 - protein, 10 aa, Artificial Sequence
  Artificially Synthesized Peptide
SRACHPCSPM

SEQ ID NO: 1704 - protein, 8 aa, Artificial Sequence
  Artificially Synthesized Peptide
SRLLGICL

SEQ ID NO: 1705 - protein, 10 aa, Artificial Sequence
  Artificially Synthesized Peptide
SRMARDPQRF

SEQ ID NO: 1706 - protein, 10 aa, Artificial Sequence
  Artificially Synthesized Peptide
THDPSPLQRY

SEQ ID NO: 1707 - protein, 11 aa, Artificial Sequence
  Artificially Synthesized Peptide
THLCFVHTVPW

SEQ ID NO: 1708 - protein, 9 aa, Artificial Sequence
  Artificially Synthesized Peptide
THLDMLRHL

SEQ ID NO: 1709 - protein, 10 aa, Artificial Sequence
  Artificially Synthesized Peptide
THLDMLRHLY

SEQ ID NO: 1710 - protein, 9 aa, Artificial Sequence
  Artificially Synthesized Peptide
THQSDVWSY

SEQ ID NO: 1711 - protein, 8 aa, Artificial Sequence
  Artificially Synthesized Peptide
TRSGGGDL

SEQ ID NO: 1712 - protein, 10 aa, Artificial Sequence
  Artificially Synthesized Peptide
TRSGGGDLTL

SEQ ID NO: 1713 - protein, 11 aa, Artificial Sequence
  Artificially Synthesized Peptide
VHRDLAARNVL

SEQ ID NO: 1714 - protein, 9 aa, Artificial Sequence
  Artificially Synthesized Peptide
VHTVPWDQL

SEQ ID NO: 1715 - protein, 10 aa, Artificial Sequence
  Artificially Synthesized Peptide
VHTVPWDQLF

SEQ ID NO: 1716 - protein, 10 aa, Artificial Sequence
  Artificially Synthesized Peptide
VKIPVAIKVL

SEQ ID NO: 1717 - protein, 8 aa, Artificial Sequence
  Artificially Synthesized Peptide
VKITDFGL

SEQ ID NO: 1718 - protein, 11 aa, Artificial Sequence
  Artificially Synthesized Peptide
VKITDFGLARL

SEQ ID NO: 1719 - protein, 8 aa, Artificial Sequence
  Artificially Synthesized Peptide
VKPDLSYM

SEQ ID NO: 1720 - protein, 10 aa, Artificial Sequence
  Artificially Synthesized Peptide
VKPDLSYMPI

SEQ ID NO: 1721 - protein, 11 aa, Artificial Sequence
  Artificially Synthesized Peptide
VKPDLSYMPIW

SEQ ID NO: 1722 - protein, 9 aa, Artificial Sequence
  Artificially Synthesized Peptide
VKSPNHVKI

SEQ ID NO: 1723 - protein, 9 aa, Artificial Sequence
  Artificially Synthesized Peptide
VKVLGSGAF

SEQ ID NO: 1724 - protein, 9 aa, Artificial Sequence
  Artificially Synthesized Peptide
VRAVTSANI

SEQ ID NO: 1725 - protein, 8 aa, Artificial Sequence
  Artificially Synthesized Peptide
VRENRGRL

SEQ ID NO: 1726 - protein, 11 aa, Artificial Sequence
  Artificially Synthesized Peptide
VRGTQLFEDNY

SEQ ID NO: 1727 - protein, 8 aa, Artificial Sequence
  Artificially Synthesized Peptide
VRLVHRDL

SEQ ID NO: 1728 - protein, 9 aa, Artificial Sequence
  Artificially Synthesized Peptide
VRQVPLQRL

SEQ ID NO: 1729 - protein, 11 aa, Artificial Sequence
  Artificially Synthesized Peptide
VRQVPLQRLRI

SEQ ID NO: 1730 - protein, 11 aa, Artificial Sequence
  Artificially Synthesized Peptide
WKDIFHKNNQL

SEQ ID NO: 1731 - protein, 10 aa, Artificial Sequence
  Artificially Synthesized Peptide
YHADGGKVPI

SEQ ID NO: 1732 - protein, 10 aa, Artificial Sequence
  Artificially Synthesized Peptide
YRSLLEDDDM

SEQ ID NO: 1733 - protein, 8 aa, Artificial Sequence
  Artificially Synthesized Peptide
AAKGLQSL

SEQ ID NO: 1734 - protein, 8 aa, Artificial Sequence
  Artificially Synthesized Peptide
AALCRWGL

SEQ ID NO: 1735 - protein, 9 aa, Artificial Sequence
  Artificially Synthesized Peptide
AALCRWGLL

SEQ ID NO: 1736 - protein, 10 aa, Artificial Sequence
  Artificially Synthesized Peptide
AALCRWGLLL

SEQ ID NO: 1737 - protein, 11 aa, Artificial Sequence
  Artificially Synthesized Peptide
AAPQPHPPPAF

SEQ ID NO: 1738 - protein, 9 aa, Artificial Sequence
  Artificially Synthesized Peptide
AARPAGATL

SEQ ID NO: 1739 - protein, 9 aa, Artificial Sequence
  Artificially Synthesized Peptide
ASCVTACPY

SEQ ID NO: 1740 - protein, 11 aa, Artificial Sequence
  Artificially Synthesized Peptide
ASCVTACPYNY

SEQ ID NO: 1741 - protein, 9 aa, Artificial Sequence
  Artificially Synthesized Peptide
ASLSFLQDI

SEQ ID NO: 1742 - protein, 9 aa, Artificial Sequence
  Artificially Synthesized Peptide
ASPETHLDM

SEQ ID NO: 1743 - protein, 10 aa, Artificial Sequence
  Artificially Synthesized Peptide
ASPETHLDML

SEQ ID NO: 1744 - protein, 9 aa, Artificial Sequence
  Artificially Synthesized Peptide
ASPGGLREL

SEQ ID NO: 1745 - protein, 11 aa, Artificial Sequence
  Artificially Synthesized Peptide
ASPGGLRELQL

SEQ ID NO: 1746 - protein, 8 aa, Artificial Sequence
  Artificially Synthesized Peptide
ASPLDSTF

SEQ ID NO: 1747 - protein, 9 aa, Artificial Sequence
  Artificially Synthesized Peptide
ASPLDSTFY

SEQ ID NO: 1748 - protein, 8 aa, Artificial Sequence
  Artificially Synthesized Peptide
ASPLTSII

SEQ ID NO: 1749 - protein, 11 aa, Artificial Sequence
  Artificially Synthesized Peptide
ASPLTSIISAV

SEQ ID NO: 1750 - protein, 11 aa, Artificial Sequence
  Artificially Synthesized Peptide
ASTQVCTGTDM

SEQ ID NO: 1751 - protein, 9 aa, Artificial Sequence
  Artificially Synthesized Peptide
ATLERPKTL

SEQ ID NO: 1752 - protein, 9 aa, Artificial Sequence
  Artificially Synthesized Peptide
CAHYKDPPF

SEQ ID NO: 1753 - protein, 11 aa, Artificial Sequence
  Artificially Synthesized Peptide
CAHYKDPPFCV

SEQ ID NO: 1754 - protein, 8 aa, Artificial Sequence
  Artificially Synthesized Peptide
CARCKGPL

SEQ ID NO: 1755 - protein, 8 aa, Artificial Sequence
  Artificially Synthesized Peptide
CARVCYGL

SEQ ID NO: 1756 - protein, 10 aa, Artificial Sequence
  Artificially Synthesized Peptide
CARVCYGLGM

SEQ ID NO: 1757 - protein, 8 aa, Artificial Sequence
  Artificially Synthesized Peptide
CSKPCARV

SEQ ID NO: 1758 - protein, 10 aa, Artificial Sequence
  Artificially Synthesized Peptide
CSKPCARVCY

SEQ ID NO: 1759 - protein, 11 aa, Artificial Sequence
  Artificially Synthesized Peptide
CSPMCKGSRCW

SEQ ID NO: 1760 - protein, 8 aa, Artificial Sequence
  Artificially Synthesized Peptide
CSPQPEYV

SEQ ID NO: 1761 - protein, 11 aa, Artificial Sequence
  Artificially Synthesized Peptide
CSQFLRGQECV

SEQ ID NO: 1762 - protein, 10 aa, Artificial Sequence
  Artificially Synthesized Peptide
CTGPKHSDCL

SEQ ID NO: 1763 - protein, 8 aa, Artificial Sequence
  Artificially Synthesized Peptide
CTGTDMKL

SEQ ID NO: 1764 - protein, 10 aa, Artificial Sequence
  Artificially Synthesized Peptide
CTGTDMKLRL

SEQ ID NO: 1765 - protein, 8 aa, Artificial Sequence
  Artificially Synthesized Peptide
CTHSCVDL

SEQ ID NO: 1766 - protein, 8 aa, Artificial Sequence
  Artificially Synthesized Peptide
CTIDVYMI

SEQ ID NO: 1767 - protein, 9 aa, Artificial Sequence
  Artificially Synthesized Peptide
CTIDVYMIM

SEQ ID NO: 1768 - protein, 10 aa, Artificial Sequence
  Artificially Synthesized Peptide
CTIDVYMIMV

SEQ ID NO: 1769 - protein, 8 aa, Artificial Sequence
  Artificially Synthesized Peptide
DSECRPRF

SEQ ID NO: 1770 - protein, 11 aa, Artificial Sequence
  Artificially Synthesized Peptide
DSECRPRFREL

SEQ ID NO: 1771 - protein, 8 aa, Artificial Sequence
  Artificially Synthesized Peptide
DSLPDLSV

SEQ ID NO: 1772 - protein, 9 aa, Artificial Sequence
  Artificially Synthesized Peptide
DSLPDLSVF

SEQ ID NO: 1773 - protein, 8 aa, Artificial Sequence
  Artificially Synthesized Peptide
DSTFYRSL

SEQ ID NO: 1774 - protein, 9 aa, Artificial Sequence
  Artificially Synthesized Peptide
DSTFYRSLL

SEQ ID NO: 1775 - protein, 8 aa, Artificial Sequence
  Artificially Synthesized Peptide
DTILWKDI

SEQ ID NO: 1776 - protein, 9 aa, Artificial Sequence
  Artificially Synthesized Peptide
DTILWKDIF

SEQ ID NO: 1777 - protein, 11 aa, Artificial Sequence
  Artificially Synthesized Peptide
EADQCVACAHY

SEQ ID NO: 1778 - protein, 8 aa, Artificial Sequence
  Artificially Synthesized Peptide
EAYVMAGV

SEQ ID NO: 1779 - protein, 8 aa, Artificial Sequence
  Artificially Synthesized Peptide
ESILRRRF

SEQ ID NO: 1780 - protein, 10 aa, Artificial Sequence
  Artificially Synthesized Peptide
ESMPNPEGRY

SEQ ID NO: 1781 - protein, 9 aa, Artificial Sequence
  Artificially Synthesized Peptide
ESSEDCQSL

SEQ ID NO: 1782 - protein, 9 aa, Artificial Sequence
  Artificially Synthesized Peptide
ETDGYVAPL

SEQ ID NO: 1783 - protein, 9 aa, Artificial Sequence
  Artificially Synthesized Peptide
ETELRKVKV

SEQ ID NO: 1784 - protein, 10 aa, Artificial Sequence
  Artificially Synthesized Peptide
ETELRKVKVL

SEQ ID NO: 1785 - protein, 8 aa, Artificial Sequence
  Artificially Synthesized Peptide
ETELVEPL

SEQ ID NO: 1786 - protein, 11 aa, Artificial Sequence
  Artificially Synthesized Peptide
ETEYHADGGKV

SEQ ID NO: 1787 - protein, 10 aa, Artificial Sequence
  Artificially Synthesized Peptide
ETHLDMLRHL

SEQ ID NO: 1788 - protein, 11 aa, Artificial Sequence
  Artificially Synthesized Peptide
ETHLDMLRHLY

SEQ ID NO: 1789 - protein, 9 aa, Artificial Sequence
  Artificially Synthesized Peptide
ETLEEITGY

SEQ ID NO: 1790 - protein, 10 aa, Artificial Sequence
  Artificially Synthesized Peptide
ETLEEITGYL

SEQ ID NO: 1791 - protein, 11 aa, Artificial Sequence
  Artificially Synthesized Peptide
ETLEEITGYLY

SEQ ID NO: 1792 - protein, 8 aa, Artificial Sequence
  Artificially Synthesized Peptide
FAGCKKIF

SEQ ID NO: 1793 - protein, 11 aa, Artificial Sequence
  Artificially Synthesized Peptide
FAGCKKIFGSL

SEQ ID NO: 1794 - protein, 8 aa, Artificial Sequence
  Artificially Synthesized Peptide
FSPAFDNL

SEQ ID NO: 1795 - protein, 9 aa, Artificial Sequence
  Artificially Synthesized Peptide
FSPAFDNLY

SEQ ID NO: 1796 - protein, 10 aa, Artificial Sequence
  Artificially Synthesized Peptide
FSPAFDNLYY

SEQ ID NO: 1797 - protein, 11 aa, Artificial Sequence
  Artificially Synthesized Peptide
FSPAFDNLYYW

SEQ ID NO: 1798 - protein, 11 aa, Artificial Sequence
  Artificially Synthesized Peptide
FSRMARDPQRF

SEQ ID NO: 1799 - protein, 8 aa, Artificial Sequence
  Artificially Synthesized Peptide
FTHQSDVW

SEQ ID NO: 1800 - protein, 10 aa, Artificial Sequence
  Artificially Synthesized Peptide
FTHQSDVWSY

SEQ ID NO: 1801 - protein, 9 aa, Artificial Sequence
  Artificially Synthesized Peptide
GAAKGLQSL

SEQ ID NO: 1802 - protein, 8 aa, Artificial Sequence
  Artificially Synthesized Peptide
GACQPCPI

SEQ ID NO: 1803 - protein, 10 aa, Artificial Sequence
  Artificially Synthesized Peptide
GAFGTVYKGI

SEQ ID NO: 1804 - protein, 11 aa, Artificial Sequence
  Artificially Synthesized Peptide
GAFGTVYKGIW

SEQ ID NO: 1805 - protein, 11 aa, Artificial Sequence
  Artificially Synthesized Peptide
GAGSDVFDGDL

SEQ ID NO: 1806 - protein, 8 aa, Artificial Sequence
  Artificially Synthesized Peptide
GAKPYDGI

SEQ ID NO: 1807 - protein, 9 aa, Artificial Sequence
  Artificially Synthesized Peptide
GAMPNQAQM

SEQ ID NO: 1808 - protein, 11 aa, Artificial Sequence
  Artificially Synthesized Peptide
GAMPNQAQMRI

SEQ ID NO: 1809 - protein, 10 aa, Artificial Sequence
  Artificially Synthesized Peptide
GASCVTACPY

SEQ ID NO: 1810 - protein, 10 aa, Artificial Sequence
  Artificially Synthesized Peptide
GASPGGLREL

SEQ ID NO: 1811 - protein, 10 aa, Artificial Sequence
  Artificially Synthesized Peptide
GATLERPKTL

SEQ ID NO: 1812 - protein, 8 aa, Artificial Sequence
  Artificially Synthesized Peptide
GAVENPEY

SEQ ID NO: 1813 - protein, 9 aa, Artificial Sequence
  Artificially Synthesized Peptide
GAVENPEYL

SEQ ID NO: 1814 - protein, 10 aa, Artificial Sequence
  Artificially Synthesized Peptide
GAYSLTLQGL

SEQ ID NO: 1815 - protein, 9 aa, Artificial Sequence
  Artificially Synthesized Peptide
GSCTLVCPL

SEQ ID NO: 1816 - protein, 9 aa, Artificial Sequence
  Artificially Synthesized Peptide
GSDVFDGDL

SEQ ID NO: 1817 - protein, 11 aa, Artificial Sequence
  Artificially Synthesized Peptide
GSDVFDGDLGM

SEQ ID NO: 1818 - protein, 8 aa, Artificial Sequence
  Artificially Synthesized Peptide
GSGAFGTV

SEQ ID NO: 1819 - protein, 9 aa, Artificial Sequence
  Artificially Synthesized Peptide
GSGAFGTVY

SEQ ID NO: 1820 - protein, 10 aa, Artificial Sequence
  Artificially Synthesized Peptide
GSLAFLPESF

SEQ ID NO: 1821 - protein, 8 aa, Artificial Sequence
  Artificially Synthesized Peptide
GSPYVSRL

SEQ ID NO: 1822 - protein, 9 aa, Artificial Sequence
  Artificially Synthesized Peptide
GSPYVSRLL

SEQ ID NO: 1823 - protein, 11 aa, Artificial Sequence
  Artificially Synthesized Peptide
GSPYVSRLLGI

SEQ ID NO: 1824 - protein, 8 aa, Artificial Sequence
  Artificially Synthesized Peptide
GSQDLLNW

SEQ ID NO: 1825 - protein, 10 aa, Artificial Sequence
  Artificially Synthesized Peptide
GSQDLLNWCM

SEQ ID NO: 1826 - protein, 8 aa, Artificial Sequence
  Artificially Synthesized Peptide
GTDMKLRL

SEQ ID NO: 1827 - protein, 10 aa, Artificial Sequence
  Artificially Synthesized Peptide
GTPTAENPEY

SEQ ID NO: 1828 - protein, 11 aa, Artificial Sequence
  Artificially Synthesized Peptide
GTPTAENPEYL

SEQ ID NO: 1829 - protein, 9 aa, Artificial Sequence
  Artificially Synthesized Peptide
GTQLFEDNY

SEQ ID NO: 1830 - protein, 11 aa, Artificial Sequence
  Artificially Synthesized Peptide
GTQLFEDNYAL

SEQ ID NO: 1831 - protein, 8 aa, Artificial Sequence
  Artificially Synthesized Peptide
GTVYKGIW

SEQ ID NO: 1832 - protein, 9 aa, Artificial Sequence
  Artificially Synthesized Peptide
GTVYKGIWI

SEQ ID NO: 1833 - protein, 9 aa, Artificial Sequence
  Artificially Synthesized Peptide
HADGGKVPI

SEQ ID NO: 1834 - protein, 11 aa, Artificial Sequence
  Artificially Synthesized Peptide
HADGGKVPIKW

SEQ ID NO: 1835 - protein, 8 aa, Artificial Sequence
  Artificially Synthesized Peptide
HSDCLACL

SEQ ID NO: 1836 - protein, 10 aa, Artificial Sequence
  Artificially Synthesized Peptide
HSDCLACLHF

SEQ ID NO: 1837 - protein, 11 aa, Artificial Sequence
  Artificially Synthesized Peptide
HTANRPEDECV

SEQ ID NO: 1838 - protein, 8 aa, Artificial Sequence
  Artificially Synthesized Peptide
HTVPWDQL

SEQ ID NO: 1839 - protein, 9 aa, Artificial Sequence
  Artificially Synthesized Peptide
HTVPWDQLF

SEQ ID NO: 1840 - protein, 9 aa, Artificial Sequence
  Artificially Synthesized Peptide
IAHNQVRQV

SEQ ID NO: 1841 - protein, 11 aa, Artificial Sequence
  Artificially Synthesized Peptide
IAHNQVRQVPL

SEQ ID NO: 1842 - protein, 8 aa, Artificial Sequence
  Artificially Synthesized Peptide
IAKGMSYL

SEQ ID NO: 1843 - protein, 11 aa, Artificial Sequence
  Artificially Synthesized Peptide
IAKGMSYLEDV

SEQ ID NO: 1844 - protein, 8 aa, Artificial Sequence
  Artificially Synthesized Peptide
ISAVVGIL

SEQ ID NO: 1845 - protein, 9 aa, Artificial Sequence
  Artificially Synthesized Peptide
ISAVVGILL

SEQ ID NO: 1846 - protein, 10 aa, Artificial Sequence
  Artificially Synthesized Peptide
ISAVVGILLV

SEQ ID NO: 1847 - protein, 11 aa, Artificial Sequence
  Artificially Synthesized Peptide
ISAVVGILLVV

SEQ ID NO: 1848 - protein, 8 aa, Artificial Sequence
  Artificially Synthesized Peptide
ISAWPDSL

SEQ ID NO: 1849 - protein, 11 aa, Artificial Sequence
  Artificially Synthesized Peptide
ISAWPDSLPDL

SEQ ID NO: 1850 - protein, 9 aa, Artificial Sequence
  Artificially Synthesized Peptide
ISWLGLRSL

SEQ ID NO: 1851 - protein, 9 aa, Artificial Sequence
  Artificially Synthesized Peptide
ITDFGLARL

SEQ ID NO: 1852 - protein, 10 aa, Artificial Sequence
  Artificially Synthesized Peptide
ITDFGLARLL

SEQ ID NO: 1853 - protein, 10 aa, Artificial Sequence
  Artificially Synthesized Peptide
ITGYLYISAW

SEQ ID NO: 1854 - protein, 11 aa, Artificial Sequence
  Artificially Synthesized Peptide
KANKEILDEAY

SEQ ID NO: 1855 - protein, 8 aa, Artificial Sequence
  Artificially Synthesized Peptide
KSPNHVKI

SEQ ID NO: 1856 - protein, 11 aa, Artificial Sequence
  Artificially Synthesized Peptide
KSPNHVKITDF

SEQ ID NO: 1857 - protein, 10 aa, Artificial Sequence
  Artificially Synthesized Peptide
KTLSPGKNGV

SEQ ID NO: 1858 - protein, 11 aa, Artificial Sequence
  Artificially Synthesized Peptide
KTLSPGKNGVV

SEQ ID NO: 1859 - protein, 9 aa, Artificial Sequence
  Artificially Synthesized Peptide
LAALCRWGL

SEQ ID NO: 1860 - protein, 10 aa, Artificial Sequence
  Artificially Synthesized Peptide
LAALCRWGLL

SEQ ID NO: 1861 - protein, 11 aa, Artificial Sequence
  Artificially Synthesized Peptide
LAALCRWGLLL

SEQ ID NO: 1862 - protein, 8 aa, Artificial Sequence
  Artificially Synthesized Peptide
LAARNVLV

SEQ ID NO: 1863 - protein, 11 aa, Artificial Sequence
  Artificially Synthesized Peptide
LACLHFNHSGI

SEQ ID NO: 1864 - protein, 8 aa, Artificial Sequence
  Artificially Synthesized Peptide
LAFLPESF

SEQ ID NO: 1865 - protein, 10 aa, Artificial Sequence
  Artificially Synthesized Peptide
LALIHHNTHL

SEQ ID NO: 1866 - protein, 11 aa, Artificial Sequence
  Artificially Synthesized Peptide
LAPSEGAGSDV

SEQ ID NO: 1867 - protein, 10 aa, Artificial Sequence
  Artificially Synthesized Peptide
LAVLDNGDPL

SEQ ID NO: 1868 - protein, 10 aa, Artificial Sequence
  Artificially Synthesized Peptide
LSFLQDIQEV

SEQ ID NO: 1869 - protein, 8 aa, Artificial Sequence
  Artificially Synthesized Peptide
LSPGKNGV

SEQ ID NO: 1870 - protein, 9 aa, Artificial Sequence
  Artificially Synthesized Peptide
LSPGKNGVV

SEQ ID NO: 1871 - protein, 10 aa, Artificial Sequence
  Artificially Synthesized Peptide
LSTDVGSCTL

SEQ ID NO: 1872 - protein, 11 aa, Artificial Sequence
  Artificially Synthesized Peptide
LSTDVGSCTLV

SEQ ID NO: 1873 - protein, 9 aa, Artificial Sequence
  Artificially Synthesized Peptide
LSVFQNLQV

SEQ ID NO: 1874 - protein, 10 aa, Artificial Sequence
  Artificially Synthesized Peptide
LSVFQNLQVI

SEQ ID NO: 1875 - protein, 9 aa, Artificial Sequence
  Artificially Synthesized Peptide
LSYMPIWKF

SEQ ID NO: 1876 - protein, 9 aa, Artificial Sequence
  Artificially Synthesized Peptide
LTCSPQPEY

SEQ ID NO: 1877 - protein, 10 aa, Artificial Sequence
  Artificially Synthesized Peptide
LTCSPQPEYV

SEQ ID NO: 1878 - protein, 9 aa, Artificial Sequence
  Artificially Synthesized Peptide
LTEILKGGV

SEQ ID NO: 1879 - protein, 10 aa, Artificial Sequence
  Artificially Synthesized Peptide
LTEILKGGVL

SEQ ID NO: 1880 - protein, 11 aa, Artificial Sequence
  Artificially Synthesized Peptide
LTEILKGGVLI

SEQ ID NO: 1881 - protein, 8 aa, Artificial Sequence
  Artificially Synthesized Peptide
LTLQGLGI

SEQ ID NO: 1882 - protein, 10 aa, Artificial Sequence
  Artificially Synthesized Peptide
LTLQGLGISW

SEQ ID NO: 1883 - protein, 11 aa, Artificial Sequence
  Artificially Synthesized Peptide
LTLQGLGISWL

SEQ ID NO: 1884 - protein, 8 aa, Artificial Sequence
  Artificially Synthesized Peptide
LTSIISAV

SEQ ID NO: 1885 - protein, 9 aa, Artificial Sequence
  Artificially Synthesized Peptide
LTSIISAVV

SEQ ID NO: 1886 - protein, 11 aa, Artificial Sequence
  Artificially Synthesized Peptide
LTSIISAVVGI

SEQ ID NO: 1887 - protein, 8 aa, Artificial Sequence
  Artificially Synthesized Peptide
LTSTVQLV

SEQ ID NO: 1888 - protein, 11 aa, Artificial Sequence
  Artificially Synthesized Peptide
LTSTVQLVTQL

SEQ ID NO: 1889 - protein, 10 aa, Artificial Sequence
  Artificially Synthesized Peptide
LTYLPTNASL

SEQ ID NO: 1890 - protein, 8 aa, Artificial Sequence
  Artificially Synthesized Peptide
MAGVGSPY

SEQ ID NO: 1891 - protein, 9 aa, Artificial Sequence
  Artificially Synthesized Peptide
MAGVGSPYV

SEQ ID NO: 1892 - protein, 11 aa, Artificial Sequence
  Artificially Synthesized Peptide
MALESILRRRF

SEQ ID NO: 1893 - protein, 8 aa, Artificial Sequence
  Artificially Synthesized Peptide
MARDPQRF

SEQ ID NO: 1894 - protein, 9 aa, Artificial Sequence
  Artificially Synthesized Peptide
MARDPQRFV

SEQ ID NO: 1895 - protein, 10 aa, Artificial Sequence
  Artificially Synthesized Peptide
MARDPQRFVV

SEQ ID NO: 1896 - protein, 11 aa, Artificial Sequence
  Artificially Synthesized Peptide
MARDPQRFVVI

SEQ ID NO: 1897 - protein, 9 aa, Artificial Sequence
  Artificially Synthesized Peptide
MSYLEDVRL

SEQ ID NO: 1898 - protein, 10 aa, Artificial Sequence
  Artificially Synthesized Peptide
MSYLEDVRLV

SEQ ID NO: 1899 - protein, 8 aa, Artificial Sequence
  Artificially Synthesized Peptide
MTFGAKPY

SEQ ID NO: 1900 - protein, 11 aa, Artificial Sequence
  Artificially Synthesized Peptide
MTFGAKPYDGI

SEQ ID NO: 1901 - protein, 10 aa, Artificial Sequence
  Artificially Synthesized Peptide
NASLSFLQDI

SEQ ID NO: 1902 - protein, 10 aa, Artificial Sequence
  Artificially Synthesized Peptide
NTAPLQPEQL

SEQ ID NO: 1903 - protein, 8 aa, Artificial Sequence
  Artificially Synthesized Peptide
NTDTFESM

SEQ ID NO: 1904 - protein, 10 aa, Artificial Sequence
  Artificially Synthesized Peptide
NTHLCFVHTV

SEQ ID NO: 1905 - protein, 10 aa, Artificial Sequence
  Artificially Synthesized Peptide
NTSPKANKEI

SEQ ID NO: 1906 - protein, 11 aa, Artificial Sequence
  Artificially Synthesized Peptide
NTSPKANKEIL

SEQ ID NO: 1907 - protein, 10 aa, Artificial Sequence
  Artificially Synthesized Peptide
PAARPAGATL

SEQ ID NO: 1908 - protein, 9 aa, Artificial Sequence
  Artificially Synthesized Peptide
PAEQRASPL

SEQ ID NO: 1909 - protein, 8 aa, Artificial Sequence
  Artificially Synthesized Peptide
PAFDNLYY

SEQ ID NO: 1910 - protein, 9 aa, Artificial Sequence
  Artificially Synthesized Peptide
PAFDNLYYW

SEQ ID NO: 1911 - protein, 10 aa, Artificial Sequence
  Artificially Synthesized Peptide
PAFSPAFDNL

SEQ ID NO: 1912 - protein, 11 aa, Artificial Sequence
  Artificially Synthesized Peptide
PAFSPAFDNLY

SEQ ID NO: 1913 - protein, 11 aa, Artificial Sequence
  Artificially Synthesized Peptide
PALVTYNTDTF

SEQ ID NO: 1914 - protein, 8 aa, Artificial Sequence
  Artificially Synthesized Peptide
PAPGAGGM

SEQ ID NO: 1915 - protein, 9 aa, Artificial Sequence
  Artificially Synthesized Peptide
PAPGAGGMV

SEQ ID NO: 1916 - protein, 8 aa, Artificial Sequence
  Artificially Synthesized Peptide
PAREIPDL

SEQ ID NO: 1917 - protein, 9 aa, Artificial Sequence
  Artificially Synthesized Peptide
PAREIPDLL

SEQ ID NO: 1918 - protein, 8 aa, Artificial Sequence
  Artificially Synthesized Peptide
PASNTAPL

SEQ ID NO: 1919 - protein, 8 aa, Artificial Sequence
  Artificially Synthesized Peptide
PASPETHL

SEQ ID NO: 1920 - protein, 10 aa, Artificial Sequence
  Artificially Synthesized Peptide
PASPETHLDM

SEQ ID NO: 1921 - protein, 11 aa, Artificial Sequence
  Artificially Synthesized Peptide
PASPETHLDML

SEQ ID NO: 1922 - protein, 9 aa, Artificial Sequence
  Artificially Synthesized Peptide
PASPLDSTF

SEQ ID NO: 1923 - protein, 10 aa, Artificial Sequence
  Artificially Synthesized Peptide
PASPLDSTFY

SEQ ID NO: 1924 - protein, 11 aa, Artificial Sequence
  Artificially Synthesized Peptide
PSEEEAPRSPL

SEQ ID NO: 1925 - protein, 9 aa, Artificial Sequence
  Artificially Synthesized Peptide
PSEGAGSDV

SEQ ID NO: 1926 - protein, 10 aa, Artificial Sequence
  Artificially Synthesized Peptide
PSEGAGSDVF

SEQ ID NO: 1927 - protein, 8 aa, Artificial Sequence
  Artificially Synthesized Peptide
PSETDGYV

SEQ ID NO: 1928 - protein, 11 aa, Artificial Sequence
  Artificially Synthesized Peptide
PSETDGYVAPL

SEQ ID NO: 1929 - protein, 11 aa, Artificial Sequence
  Artificially Synthesized Peptide
PSGAMPNQAQM

SEQ ID NO: 1930 - protein, 8 aa, Artificial Sequence
  Artificially Synthesized Peptide
PSGVKPDL

SEQ ID NO: 1931 - protein, 10 aa, Artificial Sequence
  Artificially Synthesized Peptide
PSGVKPDLSY

SEQ ID NO: 1932 - protein, 11 aa, Artificial Sequence
  Artificially Synthesized Peptide
PSGVKPDLSYM

SEQ ID NO: 1933 - protein, 8 aa, Artificial Sequence
  Artificially Synthesized Peptide
PSPREGPL

SEQ ID NO: 1934 - protein, 8 aa, Artificial Sequence
  Artificially Synthesized Peptide
PTAENPEY

SEQ ID NO: 1935 - protein, 9 aa, Artificial Sequence
  Artificially Synthesized Peptide
PTAENPEYL

SEQ ID NO: 1936 - protein, 11 aa, Artificial Sequence
  Artificially Synthesized Peptide
PTAENPEYLGL

SEQ ID NO: 1937 - protein, 8 aa, Artificial Sequence
  Artificially Synthesized Peptide
PTHDPSPL

SEQ ID NO: 1938 - protein, 11 aa, Artificial Sequence
  Artificially Synthesized Peptide
PTHDPSPLQRY

SEQ ID NO: 1939 - protein, 8 aa, Artificial Sequence
  Artificially Synthesized Peptide
PTNASLSF

SEQ ID NO: 1940 - protein, 9 aa, Artificial Sequence
  Artificially Synthesized Peptide
PTNASLSFL

SEQ ID NO: 1941 - protein, 10 aa, Artificial Sequence
  Artificially Synthesized Peptide
PTQCVNCSQF

SEQ ID NO: 1942 - protein, 11 aa, Artificial Sequence
  Artificially Synthesized Peptide
PTQCVNCSQFL

SEQ ID NO: 1943 - protein, 9 aa, Artificial Sequence
  Artificially Synthesized Peptide
QSDVWSYGV

SEQ ID NO: 1944 - protein, 11 aa, Artificial Sequence
  Artificially Synthesized Peptide
QSDVWSYGVTV

SEQ ID NO: 1945 - protein, 11 aa, Artificial Sequence
  Artificially Synthesized Peptide
QSLPTHDPSPL

SEQ ID NO: 1946 - protein, 9 aa, Artificial Sequence
  Artificially Synthesized Peptide
RACHPCSPM

SEQ ID NO: 1947 - protein, 8 aa, Artificial Sequence
  Artificially Synthesized Peptide
RASPLTSI

SEQ ID NO: 1948 - protein, 9 aa, Artificial Sequence
  Artificially Synthesized Peptide
RASPLTSII

SEQ ID NO: 1949 - protein, 8 aa, Artificial Sequence
  Artificially Synthesized Peptide
RAVTSANI

SEQ ID NO: 1950 - protein, 11 aa, Artificial Sequence
  Artificially Synthesized Peptide
RAVTSANIQEF

SEQ ID NO: 1951 - protein, 9 aa, Artificial Sequence
  Artificially Synthesized Peptide
RSGGGDLTL

SEQ ID NO: 1952 - protein, 11 aa, Artificial Sequence
  Artificially Synthesized Peptide
RSGGGDLTLGL

SEQ ID NO: 1953 - protein, 9 aa, Artificial Sequence
  Artificially Synthesized Peptide
RSLLEDDDM

SEQ ID NO: 1954 - protein, 10 aa, Artificial Sequence
  Artificially Synthesized Peptide
RSLRELGSGL

SEQ ID NO: 1955 - protein, 11 aa, Artificial Sequence
  Artificially Synthesized Peptide
RSLTEILKGGV

SEQ ID NO: 1956 - protein, 11 aa, Artificial Sequence
  Artificially Synthesized Peptide
RSRACHPCSPM

SEQ ID NO: 1957 - protein, 8 aa, Artificial Sequence
  Artificially Synthesized Peptide
SAVVGILL

SEQ ID NO: 1958 - protein, 9 aa, Artificial Sequence
  Artificially Synthesized Peptide
SAVVGILLV

SEQ ID NO: 1959 - protein, 10 aa, Artificial Sequence
  Artificially Synthesized Peptide
SAVVGILLVV

SEQ ID NO: 1960 - protein, 11 aa, Artificial Sequence
  Artificially Synthesized Peptide
SAVVGILLVVV

SEQ ID NO: 1961 - protein, 10 aa, Artificial Sequence
  Artificially Synthesized Peptide
SAWPDSLPDL

SEQ ID NO: 1962 - protein, 8 aa, Artificial Sequence
  Artificially Synthesized Peptide
SSEDCQSL

SEQ ID NO: 1963 - protein, 11 aa, Artificial Sequence
  Artificially Synthesized Peptide
SSSTRSGGGDL

SEQ ID NO: 1964 - protein, 10 aa, Artificial Sequence
  Artificially Synthesized Peptide
SSTRSGGGDL

SEQ ID NO: 1965 - protein, 9 aa, Artificial Sequence
  Artificially Synthesized Peptide
STDVGSCTL

SEQ ID NO: 1966 - protein, 10 aa, Artificial Sequence
  Artificially Synthesized Peptide
STDVGSCTLV

SEQ ID NO: 1967 - protein, 8 aa, Artificial Sequence
  Artificially Synthesized Peptide
STFYRSLL

SEQ ID NO: 1968 - protein, 10 aa, Artificial Sequence
  Artificially Synthesized Peptide
STQVCTGTDM

SEQ ID NO: 1969 - protein, 9 aa, Artificial Sequence
  Artificially Synthesized Peptide
STRSGGGDL

SEQ ID NO: 1970 - protein, 11 aa, Artificial Sequence
  Artificially Synthesized Peptide
STRSGGGDLTL

SEQ ID NO: 1971 - protein, 9 aa, Artificial Sequence
  Artificially Synthesized Peptide
STVQLVTQL

SEQ ID NO: 1972 - protein, 10 aa, Artificial Sequence
  Artificially Synthesized Peptide
STVQLVTQLM

SEQ ID NO: 1973 - protein, 8 aa, Artificial Sequence
  Artificially Synthesized Peptide
TACPYNYL

SEQ ID NO: 1974 - protein, 8 aa, Artificial Sequence
  Artificially Synthesized Peptide
TAENPEYL

SEQ ID NO: 1975 - protein, 10 aa, Artificial Sequence
  Artificially Synthesized Peptide
TAENPEYLGL

SEQ ID NO: 1976 - protein, 10 aa, Artificial Sequence
  Artificially Synthesized Peptide
TANRPEDECV

SEQ ID NO: 1977 - protein, 9 aa, Artificial Sequence
  Artificially Synthesized Peptide
TAPLQPEQL

SEQ ID NO: 1978 - protein, 11 aa, Artificial Sequence
  Artificially Synthesized Peptide
TAPLQPEQLQV

SEQ ID NO: 1979 - protein, 8 aa, Artificial Sequence
  Artificially Synthesized Peptide
TSANIQEF

SEQ ID NO: 1980 - protein, 8 aa, Artificial Sequence
  Artificially Synthesized Peptide
TSIISAVV

SEQ ID NO: 1981 - protein, 10 aa, Artificial Sequence
  Artificially Synthesized Peptide
TSIISAVVGI

SEQ ID NO: 1982 - protein, 11 aa, Artificial Sequence
  Artificially Synthesized Peptide
TSIISAVVGIL

SEQ ID NO: 1983 - protein, 9 aa, Artificial Sequence
  Artificially Synthesized Peptide
TSPKANKEI

SEQ ID NO: 1984 - protein, 10 aa, Artificial Sequence
  Artificially Synthesized Peptide
TSPKANKEIL

SEQ ID NO: 1985 - protein, 10 aa, Artificial Sequence
  Artificially Synthesized Peptide
TSTVQLVTQL

SEQ ID NO: 1986 - protein, 11 aa, Artificial Sequence
  Artificially Synthesized Peptide
TSTVQLVTQLM

SEQ ID NO: 1987 - protein, 11 aa, Artificial Sequence
  Artificially Synthesized Peptide
VACAHYKDPPF

SEQ ID NO: 1988 - protein, 8 aa, Artificial Sequence
  Artificially Synthesized Peptide
VARCPSGV

SEQ ID NO: 1989 - protein, 9 aa, Artificial Sequence
  Artificially Synthesized Peptide
VSRLLGICL

SEQ ID NO: 1990 - protein, 8 aa, Artificial Sequence
  Artificially Synthesized Peptide
VTACPYNY

SEQ ID NO: 1991 - protein, 9 aa, Artificial Sequence
  Artificially Synthesized Peptide
VTACPYNYL

SEQ ID NO: 1992 - protein, 9 aa, Artificial Sequence
  Artificially Synthesized Peptide
VTGASPGGL

SEQ ID NO: 1993 - protein, 10 aa, Artificial Sequence
  Artificially Synthesized Peptide
VTQLMPYGCL

SEQ ID NO: 1994 - protein, 11 aa, Artificial Sequence
  Artificially Synthesized Peptide
VTQLMPYGCLL

SEQ ID NO: 1995 - protein, 9 aa, Artificial Sequence
  Artificially Synthesized Peptide
VTSANIQEF

SEQ ID NO: 1996 - protein, 9 aa, Artificial Sequence
  Artificially Synthesized Peptide
VTVWELMTF

SEQ ID NO: 1997 - protein, 8 aa, Artificial Sequence
  Artificially Synthesized Peptide
VTYNTDTF

SEQ ID NO: 1998 - protein, 11 aa, Artificial Sequence
  Artificially Synthesized Peptide
VTYNTDTFESM

SEQ ID NO: 1999 - protein, 8 aa, Artificial Sequence
  Artificially Synthesized Peptide
WSYGVTVW

SEQ ID NO: 2000 - protein, 10 aa, Artificial Sequence
  Artificially Synthesized Peptide
WSYGVTVWEL

SEQ ID NO: 2001 - protein, 11 aa, Artificial Sequence
  Artificially Synthesized Peptide
WSYGVTVWELM

SEQ ID NO: 2002 - protein, 9 aa, Artificial Sequence
  Artificially Synthesized Peptide
YSEDPTVPL

SEQ ID NO: 2003 - protein, 8 aa, Artificial Sequence
  Artificially Synthesized Peptide
YSLTLQGL

SEQ ID NO: 2004 - protein, 10 aa, Artificial Sequence
  Artificially Synthesized Peptide
YSLTLQGLGI

SEQ ID NO: 2005 - protein, 8 aa, Artificial Sequence
  Artificially Synthesized Peptide
YTFGASCV

SEQ ID NO: 2006 - protein, 10 aa, Artificial Sequence
  Artificially Synthesized Peptide
ALESILRRRF

SEQ ID NO: 2007 - protein, 11 aa, Artificial Sequence
  Artificially Synthesized Peptide
ALIHHNTHLCF

SEQ ID NO: 2008 - protein, 10 aa, Artificial Sequence
  Artificially Synthesized Peptide
ALVTYNTDTF

SEQ ID NO: 2009 - protein, 8 aa, Artificial Sequence
  Artificially Synthesized Peptide
AMPNQAQM

SEQ ID NO: 2010 - protein, 10 aa, Artificial Sequence
  Artificially Synthesized Peptide
AMPNQAQMRI

SEQ ID NO: 2011 - protein, 8 aa, Artificial Sequence
  Artificially Synthesized Peptide
APGAGGMV

SEQ ID NO: 2012 - protein, 10 aa, Artificial Sequence
  Artificially Synthesized Peptide
APLQPEQLQV

SEQ ID NO: 2013 - protein, 11 aa, Artificial Sequence
  Artificially Synthesized Peptide
APLQPEQLQVF

SEQ ID NO: 2014 - protein, 11 aa, Artificial Sequence
  Artificially Synthesized Peptide
APLTCSPQPEY

SEQ ID NO: 2015 - protein, 10 aa, Artificial Sequence
  Artificially Synthesized Peptide
APQPHPPPAF

SEQ ID NO: 2016 - protein, 10 aa, Artificial Sequence
  Artificially Synthesized Peptide
APSEGAGSDV

SEQ ID NO: 2017 - protein, 11 aa, Artificial Sequence
  Artificially Synthesized Peptide
APSEGAGSDVF

SEQ ID NO: 2018 - protein, 10 aa, Artificial Sequence
  Artificially Synthesized Peptide
AVTSANIQEF

SEQ ID NO: 2019 - protein, 8 aa, Artificial Sequence
  Artificially Synthesized Peptide
AVVGILLV

SEQ ID NO: 2020 - protein, 9 aa, Artificial Sequence
  Artificially Synthesized Peptide
AVVGILLVV

SEQ ID NO: 2021 - protein, 10 aa, Artificial Sequence
  Artificially Synthesized Peptide
AVVGILLVVV

SEQ ID NO: 2022 - protein, 9 aa, Artificial Sequence
  Artificially Synthesized Peptide
CLHFNHSGI

SEQ ID NO: 2023 - protein, 9 aa, Artificial Sequence
  Artificially Synthesized Peptide
CLTSTVQLV

SEQ ID NO: 2024 - protein, 8 aa, Artificial Sequence
  Artificially Synthesized Peptide
CMQIAKGM

SEQ ID NO: 2025 - protein, 10 aa, Artificial Sequence
  Artificially Synthesized Peptide
CMQIAKGMSY

SEQ ID NO: 2026 - protein, 11 aa, Artificial Sequence
  Artificially Synthesized Peptide
CPDPAPGAGGM

SEQ ID NO: 2027 - protein, 10 aa, Artificial Sequence
  Artificially Synthesized Peptide
CPINCTHSCV

SEQ ID NO: 2028 - protein, 8 aa, Artificial Sequence
  Artificially Synthesized Peptide
CPLHNQEV

SEQ ID NO: 2029 - protein, 11 aa, Artificial Sequence
  Artificially Synthesized Peptide
CPSGVKPDLSY

SEQ ID NO: 2030 - protein, 10 aa, Artificial Sequence
  Artificially Synthesized Peptide
CPYNYLSTDV

SEQ ID NO: 2031 - protein, 8 aa, Artificial Sequence
  Artificially Synthesized Peptide
CQPQNGSV

SEQ ID NO: 2032 - protein, 11 aa, Artificial Sequence
  Artificially Synthesized Peptide
CQPQNGSVTCF

SEQ ID NO: 2033 - protein, 8 aa, Artificial Sequence
  Artificially Synthesized Peptide
CQSLTRTV

SEQ ID NO: 2034 - protein, 9 aa, Artificial Sequence
  Artificially Synthesized Peptide
CVARCPSGV

SEQ ID NO: 2035 - protein, 9 aa, Artificial Sequence
  Artificially Synthesized Peptide
CVTACPYNY

SEQ ID NO: 2036 - protein, 8 aa, Artificial Sequence
  Artificially Synthesized Peptide
DIQEVQGY

SEQ ID NO: 2037 - protein, 9 aa, Artificial Sequence
  Artificially Synthesized Peptide
DIQEVQGYV

SEQ ID NO: 2038 - protein, 11 aa, Artificial Sequence
  Artificially Synthesized Peptide
DIQEVQGYVLI

SEQ ID NO: 2039 - protein, 9 aa, Artificial Sequence
  Artificially Synthesized Peptide
DLAARNVLV

SEQ ID NO: 2040 - protein, 9 aa, Artificial Sequence
  Artificially Synthesized Peptide
DLLNWCMQI

SEQ ID NO: 2041 - protein, 10 aa, Artificial Sequence
  Artificially Synthesized Peptide
DLSVFQNLQV

SEQ ID NO: 2042 - protein, 11 aa, Artificial Sequence
  Artificially Synthesized Peptide
DLSVFQNLQVI

SEQ ID NO: 2043 - protein, 8 aa, Artificial Sequence
  Artificially Synthesized Peptide
DLSYMPIW

SEQ ID NO: 2044 - protein, 10 aa, Artificial Sequence
  Artificially Synthesized Peptide
DLSYMPIWKF

SEQ ID NO: 2045 - protein, 8 aa, Artificial Sequence
  Artificially Synthesized Peptide
DLVDAEEY

SEQ ID NO: 2046 - protein, 10 aa, Artificial Sequence
  Artificially Synthesized Peptide
DLVDAEEYLV

SEQ ID NO: 2047 - protein, 11 aa, Artificial Sequence
  Artificially Synthesized Peptide
DMGDLVDAEEY

SEQ ID NO: 2048 - protein, 9 aa, Artificial Sequence
  Artificially Synthesized Peptide
DPAPGAGGM

SEQ ID NO: 2049 - protein, 10 aa, Artificial Sequence
  Artificially Synthesized Peptide
DPAPGAGGMV

SEQ ID NO: 2050 - protein, 9 aa, Artificial Sequence
  Artificially Synthesized Peptide
DPLNNTTPV

SEQ ID NO: 2051 - protein, 8 aa, Artificial Sequence
  Artificially Synthesized Peptide
DPQRFVVI

SEQ ID NO: 2052 - protein, 8 aa, Artificial Sequence
  Artificially Synthesized Peptide
DPSPLQRY

SEQ ID NO: 2053 - protein, 9 aa, Artificial Sequence
  Artificially Synthesized Peptide
DQCVACAHY

SEQ ID NO: 2054 - protein, 9 aa, Artificial Sequence
  Artificially Synthesized Peptide
DVFAFGGAV

SEQ ID NO: 2055 - protein, 9 aa, Artificial Sequence
  Artificially Synthesized Peptide
DVFDGDLGM

SEQ ID NO: 2056 - protein, 8 aa, Artificial Sequence
  Artificially Synthesized Peptide
DVGSCTLV

SEQ ID NO: 2057 - protein, 9 aa, Artificial Sequence
  Artificially Synthesized Peptide
DVWSYGVTV

SEQ ID NO: 2058 - protein, 10 aa, Artificial Sequence
  Artificially Synthesized Peptide
DVWSYGVTVW

SEQ ID NO: 2059 - protein, 10 aa, Artificial Sequence
  Artificially Synthesized Peptide
DVYMIMVKCW

SEQ ID NO: 2060 - protein, 11 aa, Artificial Sequence
  Artificially Synthesized Peptide
DVYMIMVKCWM

SEQ ID NO: 2061 - protein, 8 aa, Artificial Sequence
  Artificially Synthesized Peptide
EILDEAYV

SEQ ID NO: 2062 - protein, 9 aa, Artificial Sequence
  Artificially Synthesized Peptide
EILDEAYVM

SEQ ID NO: 2063 - protein, 9 aa, Artificial Sequence
  Artificially Synthesized Peptide
EILKGGVLI

SEQ ID NO: 2064 - protein, 8 aa, Artificial Sequence
  Artificially Synthesized Peptide
EITGYLYI

SEQ ID NO: 2065 - protein, 11 aa, Artificial Sequence
  Artificially Synthesized Peptide
EITGYLYISAW

SEQ ID NO: 2066 - protein, 8 aa, Artificial Sequence
  Artificially Synthesized Peptide
ELAALCRW

SEQ ID NO: 2067 - protein, 9 aa, Artificial Sequence
  Artificially Synthesized Peptide
ELGSGLALI

SEQ ID NO: 2068 - protein, 8 aa, Artificial Sequence
  Artificially Synthesized Peptide
ELHCPALV

SEQ ID NO: 2069 - protein, 10 aa, Artificial Sequence
  Artificially Synthesized Peptide
ELHCPALVTY

SEQ ID NO: 2070 - protein, 10 aa, Artificial Sequence
  Artificially Synthesized Peptide
ELMTFGAKPY

SEQ ID NO: 2071 - protein, 10 aa, Artificial Sequence
  Artificially Synthesized Peptide
ELQLRSLTEI

SEQ ID NO: 2072 - protein, 9 aa, Artificial Sequence
  Artificially Synthesized Peptide
ELVSEFSRM

SEQ ID NO: 2073 - protein, 9 aa, Artificial Sequence
  Artificially Synthesized Peptide
EPLTPSGAM

SEQ ID NO: 2074 - protein, 10 aa, Artificial Sequence
  Artificially Synthesized Peptide
EQRASPLTSI

SEQ ID NO: 2075 - protein, 11 aa, Artificial Sequence
  Artificially Synthesized Peptide
EQRASPLTSII

SEQ ID NO: 2076 - protein, 8 aa, Artificial Sequence
  Artificially Synthesized Peptide
EVQGYVLI

SEQ ID NO: 2077 - protein, 10 aa, Artificial Sequence
  Artificially Synthesized Peptide
EVRAVTSANI

SEQ ID NO: 2078 - protein, 8 aa, Artificial Sequence
  Artificially Synthesized Peptide
FLQDIQEV

SEQ ID NO: 2079 - protein, 11 aa, Artificial Sequence
  Artificially Synthesized Peptide
FLQDIQEVQGY

SEQ ID NO: 2080 - protein, 8 aa, Artificial Sequence
  Artificially Synthesized Peptide
FLRGQECV

SEQ ID NO: 2081 - protein, 11 aa, Artificial Sequence
  Artificially Synthesized Peptide
FQNLQVIRGRI

SEQ ID NO: 2082 - protein, 11 aa, Artificial Sequence
  Artificially Synthesized Peptide
FVHTVPWDQLF

SEQ ID NO: 2083 - protein, 11 aa, Artificial Sequence
  Artificially Synthesized Peptide
GICELHCPALV

SEQ ID NO: 2084 - protein, 8 aa, Artificial Sequence
  Artificially Synthesized Peptide
GICLTSTV

SEQ ID NO: 2085 - protein, 11 aa, Artificial Sequence
  Artificially Synthesized Peptide
GICLTSTVQLV

SEQ ID NO: 2086 - protein, 11 aa, Artificial Sequence
  Artificially Synthesized Peptide
GILIKRRQQKI

SEQ ID NO: 2087 - protein, 10 aa, Artificial Sequence
  Artificially Synthesized Peptide
GILLVVVLGV

SEQ ID NO: 2088 - protein, 11 aa, Artificial Sequence
  Artificially Synthesized Peptide
GILLVVVLGVV

SEQ ID NO: 2089 - protein, 10 aa, Artificial Sequence
  Artificially Synthesized Peptide
GIWIPDGENV

SEQ ID NO: 2090 - protein, 8 aa, Artificial Sequence
  Artificially Synthesized Peptide
GLARLLDI

SEQ ID NO: 2091 - protein, 10 aa, Artificial Sequence
  Artificially Synthesized Peptide
GLGMEHLREV

SEQ ID NO: 2092 - protein, 8 aa, Artificial Sequence
  Artificially Synthesized Peptide
GMEHLREV

SEQ ID NO: 2093 - protein, 11 aa, Artificial Sequence
  Artificially Synthesized Peptide
GMEHLREVRAV

SEQ ID NO: 2094 - protein, 8 aa, Artificial Sequence
  Artificially Synthesized Peptide
GMSYLEDV

SEQ ID NO: 2095 - protein, 11 aa, Artificial Sequence
  Artificially Synthesized Peptide
GMSYLEDVRLV

SEQ ID NO: 2096 - protein, 10 aa, Artificial Sequence
  Artificially Synthesized Peptide
GPASPLDSTF

SEQ ID NO: 2097 - protein, 11 aa, Artificial Sequence
  Artificially Synthesized Peptide
GPASPLDSTFY

SEQ ID NO: 2098 - protein, 8 aa, Artificial Sequence
  Artificially Synthesized Peptide
GPEADQCV

SEQ ID NO: 2099 - protein, 8 aa, Artificial Sequence
  Artificially Synthesized Peptide
GPGPTQCV

SEQ ID NO: 2100 - protein, 11 aa, Artificial Sequence
  Artificially Synthesized Peptide
GPTQCVNCSQF

SEQ ID NO: 2101 - protein, 10 aa, Artificial Sequence
  Artificially Synthesized Peptide
GQECVEECRV

SEQ ID NO: 2102 - protein, 8 aa, Artificial Sequence
  Artificially Synthesized Peptide
GVKPDLSY

SEQ ID NO: 2103 - protein, 9 aa, Artificial Sequence
  Artificially Synthesized Peptide
GVKPDLSYM

SEQ ID NO: 2104 - protein, 11 aa, Artificial Sequence
  Artificially Synthesized Peptide
GVKPDLSYMPI

SEQ ID NO: 2105 - protein, 8 aa, Artificial Sequence
  Artificially Synthesized Peptide
GVTVWELM

SEQ ID NO: 2106 - protein, 10 aa, Artificial Sequence
  Artificially Synthesized Peptide
GVTVWELMTF

SEQ ID NO: 2107 - protein, 8 aa, Artificial Sequence
  Artificially Synthesized Peptide
GVVFGILI

SEQ ID NO: 2108 - protein, 9 aa, Artificial Sequence
  Artificially Synthesized Peptide
GVVKDVFAF

SEQ ID NO: 2109 - protein, 8 aa, Artificial Sequence
  Artificially Synthesized Peptide
HLCFVHTV

SEQ ID NO: 2110 - protein, 10 aa, Artificial Sequence
  Artificially Synthesized Peptide
HLCFVHTVPW

SEQ ID NO: 2111 - protein, 9 aa, Artificial Sequence
  Artificially Synthesized Peptide
HLDMLRHLY

SEQ ID NO: 2112 - protein, 8 aa, Artificial Sequence
  Artificially Synthesized Peptide
HLREVRAV

SEQ ID NO: 2113 - protein, 8 aa, Artificial Sequence
  Artificially Synthesized Peptide
HLYQGCQV

SEQ ID NO: 2114 - protein, 9 aa, Artificial Sequence
  Artificially Synthesized Peptide
HLYQGCQVV

SEQ ID NO: 2115 - protein, 11 aa, Artificial Sequence
  Artificially Synthesized Peptide
HPECQPQNGSV

SEQ ID NO: 2116 - protein, 10 aa, Artificial Sequence
  Artificially Synthesized Peptide
HPPPAFSPAF

SEQ ID NO: 2117 - protein, 10 aa, Artificial Sequence
  Artificially Synthesized Peptide
HQLCARGHCW

SEQ ID NO: 2118 - protein, 8 aa, Artificial Sequence
  Artificially Synthesized Peptide
HQSDVWSY

SEQ ID NO: 2119 - protein, 10 aa, Artificial Sequence
  Artificially Synthesized Peptide
HQSDVWSYGV

SEQ ID NO: 2120 - protein, 8 aa, Artificial Sequence
  Artificially Synthesized Peptide
IISAVVGI

SEQ ID NO: 2121 - protein, 11 aa, Artificial Sequence
  Artificially Synthesized Peptide
IISAVVGILLV

SEQ ID NO: 2122 - protein, 8 aa, Artificial Sequence
  Artificially Synthesized Peptide
ILDEAYVM

SEQ ID NO: 2123 - protein, 11 aa, Artificial Sequence
  Artificially Synthesized Peptide
ILDEAYVMAGV

SEQ ID NO: 2124 - protein, 10 aa, Artificial Sequence
  Artificially Synthesized Peptide
ILIKRRQQKI

SEQ ID NO: 2125 - protein, 10 aa, Artificial Sequence
  Artificially Synthesized Peptide
ILKETELRKV

SEQ ID NO: 2126 - protein, 8 aa, Artificial Sequence
  Artificially Synthesized Peptide
ILKGGVLI

SEQ ID NO: 2127 - protein, 9 aa, Artificial Sequence
  Artificially Synthesized Peptide
ILLVVVLGV

SEQ ID NO: 2128 - protein, 10 aa, Artificial Sequence
  Artificially Synthesized Peptide
ILLVVVLGVV

SEQ ID NO: 2129 - protein, 11 aa, Artificial Sequence
  Artificially Synthesized Peptide
ILLVVVLGVVF

SEQ ID NO: 2130 - protein, 8 aa, Artificial Sequence
  Artificially Synthesized Peptide
IMVKCWMI

SEQ ID NO: 2131 - protein, 9 aa, Artificial Sequence
  Artificially Synthesized Peptide
IPDGENVKI

SEQ ID NO: 2132 - protein, 11 aa, Artificial Sequence
  Artificially Synthesized Peptide
IPDGENVKIPV

SEQ ID NO: 2133 - protein, 10 aa, Artificial Sequence
  Artificially Synthesized Peptide
IQEFAGCKKI

SEQ ID NO: 2134 - protein, 11 aa, Artificial Sequence
  Artificially Synthesized Peptide
IQEFAGCKKIF

SEQ ID NO: 2135 - protein, 8 aa, Artificial Sequence
  Artificially Synthesized Peptide
IQEVQGYV

SEQ ID NO: 2136 - protein, 10 aa, Artificial Sequence
  Artificially Synthesized Peptide
IQEVQGYVLI

SEQ ID NO: 2137 - protein, 9 aa, Artificial Sequence
  Artificially Synthesized Peptide
IQRNPQLCY

SEQ ID NO: 2138 - protein, 8 aa, Artificial Sequence
  Artificially Synthesized Peptide
IVRGTQLF

SEQ ID NO: 2139 - protein, 8 aa, Artificial Sequence
  Artificially Synthesized Peptide
KIFGSLAF

SEQ ID NO: 2140 - protein, 8 aa, Artificial Sequence
  Artificially Synthesized Peptide
KIPVAIKV

SEQ ID NO: 2141 - protein, 8 aa, Artificial Sequence
  Artificially Synthesized Peptide
KPCARVCY

SEQ ID NO: 2142 - protein, 9 aa, Artificial Sequence
  Artificially Synthesized Peptide
KPDLSYMPI

SEQ ID NO: 2143 - protein, 10 aa, Artificial Sequence
  Artificially Synthesized Peptide
KPDLSYMPIW

SEQ ID NO: 2144 - protein, 11 aa, Artificial Sequence
  Artificially Synthesized Peptide
KPYDGIPAREI

SEQ ID NO: 2145 - protein, 10 aa, Artificial Sequence
  Artificially Synthesized Peptide
KVKVLGSGAF

SEQ ID NO: 2146 - protein, 8 aa, Artificial Sequence
  Artificially Synthesized Peptide
KVLGSGAF

SEQ ID NO: 2147 - protein, 11 aa, Artificial Sequence
  Artificially Synthesized Peptide
KVLGSGAFGTV

SEQ ID NO: 2148 - protein, 10 aa, Artificial Sequence
  Artificially Synthesized Peptide
LIAHNQVRQV

SEQ ID NO: 2149 - protein, 10 aa, Artificial Sequence
  Artificially Synthesized Peptide
LIHHNTHLCF

SEQ ID NO: 2150 - protein, 11 aa, Artificial Sequence
  Artificially Synthesized Peptide
LIHHNTHLCFV

SEQ ID NO: 2151 - protein, 9 aa, Artificial Sequence
  Artificially Synthesized Peptide
LIKRRQQKI

SEQ ID NO: 2152 - protein, 10 aa, Artificial Sequence
  Artificially Synthesized Peptide
LIQRNPQLCY

SEQ ID NO: 2153 - protein, 9 aa, Artificial Sequence
  Artificially Synthesized Peptide
LLDIDETEY

SEQ ID NO: 2154 - protein, 11 aa, Artificial Sequence
  Artificially Synthesized Peptide
LLEDDDMGDLV

SEQ ID NO: 2155 - protein, 10 aa, Artificial Sequence
  Artificially Synthesized Peptide
LLGICLTSTV

SEQ ID NO: 2156 - protein, 8 aa, Artificial Sequence
  Artificially Synthesized Peptide
LLNWCMQI

SEQ ID NO: 2157 - protein, 11 aa, Artificial Sequence
  Artificially Synthesized Peptide
LLPPGAASTQV

SEQ ID NO: 2158 - protein, 8 aa, Artificial Sequence
  Artificially Synthesized Peptide
LLQETELV

SEQ ID NO: 2159 - protein, 8 aa, Artificial Sequence
  Artificially Synthesized Peptide
LLVVVLGV

SEQ ID NO: 2160 - protein, 9 aa, Artificial Sequence
  Artificially Synthesized Peptide
LLVVVLGVV

SEQ ID NO: 2161 - protein, 10 aa, Artificial Sequence
  Artificially Synthesized Peptide
LLVVVLGVVF

SEQ ID NO: 2162 - protein, 11 aa, Artificial Sequence
  Artificially Synthesized Peptide
LMPYGCLLDHV

SEQ ID NO: 2163 - protein, 9 aa, Artificial Sequence
  Artificially Synthesized Peptide
LMTFGAKPY

SEQ ID NO: 2164 - protein, 11 aa, Artificial Sequence
  Artificially Synthesized Peptide
LPASPETHLDM

SEQ ID NO: 2165 - protein, 10 aa, Artificial Sequence
  Artificially Synthesized Peptide
LPPGAASTQV

SEQ ID NO: 2166 - protein, 9 aa, Artificial Sequence
  Artificially Synthesized Peptide
LPQPPICTI

SEQ ID NO: 2167 - protein, 11 aa, Artificial Sequence
  Artificially Synthesized Peptide
LPQPPICTIDV

SEQ ID NO: 2168 - protein, 8 aa, Artificial Sequence
  Artificially Synthesized Peptide
LPSETDGY

SEQ ID NO: 2169 - protein, 9 aa, Artificial Sequence
  Artificially Synthesized Peptide
LPSETDGYV

SEQ ID NO: 2170 - protein, 9 aa, Artificial Sequence
  Artificially Synthesized Peptide
LPTNASLSF

SEQ ID NO: 2171 - protein, 10 aa, Artificial Sequence
  Artificially Synthesized Peptide
LQDIQEVQGY

SEQ ID NO: 2172 - protein, 11 aa, Artificial Sequence
  Artificially Synthesized Peptide
LQDIQEVQGYV

SEQ ID NO: 2173 - protein, 8 aa, Artificial Sequence
  Artificially Synthesized Peptide
LQGLGISW

SEQ ID NO: 2174 - protein, 8 aa, Artificial Sequence
  Artificially Synthesized Peptide
LQGLPREY

SEQ ID NO: 2175 - protein, 9 aa, Artificial Sequence
  Artificially Synthesized Peptide
LQGLPREYV

SEQ ID NO: 2176 - protein, 9 aa, Artificial Sequence
  Artificially Synthesized Peptide
LQLRSLTEI

SEQ ID NO: 2177 - protein, 8 aa, Artificial Sequence
  Artificially Synthesized Peptide
LQPEQLQV

SEQ ID NO: 2178 - protein, 9 aa, Artificial Sequence
  Artificially Synthesized Peptide
LQPEQLQVF

SEQ ID NO: 2179 - protein, 10 aa, Artificial Sequence
  Artificially Synthesized Peptide
LQRYSEDPTV

SEQ ID NO: 2180 - protein, 10 aa, Artificial Sequence
  Artificially Synthesized Peptide
LQVFETLEEI

SEQ ID NO: 2181 - protein, 8 aa, Artificial Sequence
  Artificially Synthesized Peptide
LQVIRGRI

SEQ ID NO: 2182 - protein, 10 aa, Artificial Sequence
  Artificially Synthesized Peptide
LVCPLHNQEV

SEQ ID NO: 2183 - protein, 9 aa, Artificial Sequence
  Artificially Synthesized Peptide
LVDAEEYLV

SEQ ID NO: 2184 - protein, 11 aa, Artificial Sequence
  Artificially Synthesized Peptide
LVEPLTPSGAM

SEQ ID NO: 2185 - protein, 11 aa, Artificial Sequence
  Artificially Synthesized Peptide
LVHRDLAARNV

SEQ ID NO: 2186 - protein, 8 aa, Artificial Sequence
  Artificially Synthesized Peptide
LVKSPNHV

SEQ ID NO: 2187 - protein, 10 aa, Artificial Sequence
  Artificially Synthesized Peptide
LVKSPNHVKI

SEQ ID NO: 2188 - protein, 8 aa, Artificial Sequence
  Artificially Synthesized Peptide
LVPQQGFF

SEQ ID NO: 2189 - protein, 8 aa, Artificial Sequence
  Artificially Synthesized Peptide
LVSEFSRM

SEQ ID NO: 2190 - protein, 8 aa, Artificial Sequence
  Artificially Synthesized Peptide
LVTQLMPY

SEQ ID NO: 2191 - protein, 9 aa, Artificial Sequence
  Artificially Synthesized Peptide
LVTYNTDTF

SEQ ID NO: 2192 - protein, 8 aa, Artificial Sequence
  Artificially Synthesized Peptide
LVVVLGVV

SEQ ID NO: 2193 - protein, 9 aa, Artificial Sequence
  Artificially Synthesized Peptide
LVVVLGVVF

SEQ ID NO: 2194 - protein, 11 aa, Artificial Sequence
  Artificially Synthesized Peptide
LVVVLGVVFGI

SEQ ID NO: 2195 - protein, 10 aa, Artificial Sequence
  Artificially Synthesized Peptide
MIDSECRPRF

SEQ ID NO: 2196 - protein, 8 aa, Artificial Sequence
  Artificially Synthesized Peptide
MIMVKCWM

SEQ ID NO: 2197 - protein, 9 aa, Artificial Sequence
  Artificially Synthesized Peptide
MIMVKCWMI

SEQ ID NO: 2198 - protein, 11 aa, Artificial Sequence
  Artificially Synthesized Peptide
MLRHLYQGCQV

SEQ ID NO: 2199 - protein, 8 aa, Artificial Sequence
  Artificially Synthesized Peptide
MPNPEGRY

SEQ ID NO: 2200 - protein, 10 aa, Artificial Sequence
  Artificially Synthesized Peptide
MPNPEGRYTF

SEQ ID NO: 2201 - protein, 9 aa, Artificial Sequence
  Artificially Synthesized Peptide
MPNQAQMRI

SEQ ID NO: 2202 - protein, 10 aa, Artificial Sequence
  Artificially Synthesized Peptide
MPYGCLLDHV

SEQ ID NO: 2203 - protein, 9 aa, Artificial Sequence
  Artificially Synthesized Peptide
MQIAKGMSY

SEQ ID NO: 2204 - protein, 11 aa, Artificial Sequence
  Artificially Synthesized Peptide
NIQEFAGCKKI

SEQ ID NO: 2205 - protein, 9 aa, Artificial Sequence
  Artificially Synthesized Peptide
NLQVIRGRI

SEQ ID NO: 2206 - protein, 8 aa, Artificial Sequence
  Artificially Synthesized Peptide
NPEGRYTF

SEQ ID NO: 2207 - protein, 9 aa, Artificial Sequence
  Artificially Synthesized Peptide
NPEYLGLDV

SEQ ID NO: 2208 - protein, 11 aa, Artificial Sequence
  Artificially Synthesized Peptide
NPEYLGLDVPV

SEQ ID NO: 2209 - protein, 10 aa, Artificial Sequence
  Artificially Synthesized Peptide
NPQLCYQDTI

SEQ ID NO: 2210 - protein, 8 aa, Artificial Sequence
  Artificially Synthesized Peptide
NQLALTLI

SEQ ID NO: 2211 - protein, 8 aa, Artificial Sequence
  Artificially Synthesized Peptide
NVKIPVAI

SEQ ID NO: 2212 - protein, 10 aa, Artificial Sequence
  Artificially Synthesized Peptide
NVKIPVAIKV

SEQ ID NO: 2213 - protein, 10 aa, Artificial Sequence
  Artificially Synthesized Peptide
NVLVKSPNHV

SEQ ID NO: 2214 - protein, 8 aa, Artificial Sequence
  Artificially Synthesized Peptide
PICTIDVY

SEQ ID NO: 2215 - protein, 9 aa, Artificial Sequence
  Artificially Synthesized Peptide
PICTIDVYM

SEQ ID NO: 2216 - protein, 10 aa, Artificial Sequence
  Artificially Synthesized Peptide
PICTIDVYMI

SEQ ID NO: 2217 - protein, 11 aa, Artificial Sequence
  Artificially Synthesized Peptide
PICTIDVYMIM

SEQ ID NO: 2218 - protein, 10 aa, Artificial Sequence
  Artificially Synthesized Peptide
PIKWMALESI

SEQ ID NO: 2219 - protein, 9 aa, Artificial Sequence
  Artificially Synthesized Peptide
PINCTHSCV

SEQ ID NO: 2220 - protein, 8 aa, Artificial Sequence
  Artificially Synthesized Peptide
PLNNTTPV

SEQ ID NO: 2221 - protein, 9 aa, Artificial Sequence
  Artificially Synthesized Peptide
PLPSETDGY

SEQ ID NO: 2222 - protein, 10 aa, Artificial Sequence
  Artificially Synthesized Peptide
PLPSETDGYV

SEQ ID NO: 2223 - protein, 9 aa, Artificial Sequence
  Artificially Synthesized Peptide
PLQPEQLQV

SEQ ID NO: 2224 - protein, 10 aa, Artificial Sequence
  Artificially Synthesized Peptide
PLQPEQLQVF

SEQ ID NO: 2225 - protein, 8 aa, Artificial Sequence
  Artificially Synthesized Peptide
PLQRLRIV

SEQ ID NO: 2226 - protein, 11 aa, Artificial Sequence
  Artificially Synthesized Peptide
PLQRYSEDPTV

SEQ ID NO: 2227 - protein, 10 aa, Artificial Sequence
  Artificially Synthesized Peptide
PLTCSPQPEY

SEQ ID NO: 2228 - protein, 11 aa, Artificial Sequence
  Artificially Synthesized Peptide
PLTCSPQPEYV

SEQ ID NO: 2229 - protein, 8 aa, Artificial Sequence
  Artificially Synthesized Peptide
PLTPSGAM

SEQ ID NO: 2230 - protein, 9 aa, Artificial Sequence
  Artificially Synthesized Peptide
PLTSIISAV

SEQ ID NO: 2231 - protein, 10 aa, Artificial Sequence
  Artificially Synthesized Peptide
PLTSIISAVV

SEQ ID NO: 2232 - protein, 9 aa, Artificial Sequence
  Artificially Synthesized Peptide
PMCKGSRCW

SEQ ID NO: 2233 - protein, 8 aa, Artificial Sequence
  Artificially Synthesized Peptide
PPAFSPAF

SEQ ID NO: 2234 - protein, 11 aa, Artificial Sequence
  Artificially Synthesized Peptide
PPERGAPPSTF

SEQ ID NO: 2235 - protein, 9 aa, Artificial Sequence
  Artificially Synthesized Peptide
PPGAASTQV

SEQ ID NO: 2236 - protein, 8 aa, Artificial Sequence
  Artificially Synthesized Peptide
PPICTIDV

SEQ ID NO: 2237 - protein, 9 aa, Artificial Sequence
  Artificially Synthesized Peptide
PPICTIDVY

SEQ ID NO: 2238 - protein, 10 aa, Artificial Sequence
  Artificially Synthesized Peptide
PPICTIDVYM

SEQ ID NO: 2239 - protein, 11 aa, Artificial Sequence
  Artificially Synthesized Peptide
PPICTIDVYMI

SEQ ID NO: 2240 - protein, 9 aa, Artificial Sequence
  Artificially Synthesized Peptide
PPPAFSPAF

SEQ ID NO: 2241 - protein, 9 aa, Artificial Sequence
  Artificially Synthesized Peptide
PQLCYQDTI

SEQ ID NO: 2242 - protein, 11 aa, Artificial Sequence
  Artificially Synthesized Peptide
PQLCYQDTILW

SEQ ID NO: 2243 - protein, 9 aa, Artificial Sequence
  Artificially Synthesized Peptide
PQNGSVTCF

SEQ ID NO: 2244 - protein, 11 aa, Artificial Sequence
  Artificially Synthesized Peptide
PQPEYVNQPDV

SEQ ID NO: 2245 - protein, 9 aa, Artificial Sequence
  Artificially Synthesized Peptide
PQPHPPPAF

SEQ ID NO: 2246 - protein, 8 aa, Artificial Sequence
  Artificially Synthesized Peptide
PQPPICTI

SEQ ID NO: 2247 - protein, 10 aa, Artificial Sequence
  Artificially Synthesized Peptide
PQPPICTIDV

SEQ ID NO: 2248 - protein, 11 aa, Artificial Sequence
  Artificially Synthesized Peptide
PQPPICTIDVY

SEQ ID NO: 2249 - protein, 8 aa, Artificial Sequence
  Artificially Synthesized Peptide
QIAKGMSY

SEQ ID NO: 2250 - protein, 9 aa, Artificial Sequence
  Artificially Synthesized Peptide
QLCARGHCW

SEQ ID NO: 2251 - protein, 8 aa, Artificial Sequence
  Artificially Synthesized Peptide
QLCYQDTI

SEQ ID NO: 2252 - protein, 10 aa, Artificial Sequence
  Artificially Synthesized Peptide
QLCYQDTILW

SEQ ID NO: 2253 - protein, 11 aa, Artificial Sequence
  Artificially Synthesized Peptide
QLFEDNYALAV

SEQ ID NO: 2254 - protein, 11 aa, Artificial Sequence
  Artificially Synthesized Peptide
QLQVFETLEEI

SEQ ID NO: 2255 - protein, 8 aa, Artificial Sequence
  Artificially Synthesized Peptide
QLRSLTEI

SEQ ID NO: 2256 - protein, 9 aa, Artificial Sequence
  Artificially Synthesized Peptide
QLVTQLMPY

SEQ ID NO: 2257 - protein, 8 aa, Artificial Sequence
  Artificially Synthesized Peptide
QPEQLQVF

SEQ ID NO: 2258 - protein, 10 aa, Artificial Sequence
  Artificially Synthesized Peptide
QPEYVNQPDV

SEQ ID NO: 2259 - protein, 8 aa, Artificial Sequence
  Artificially Synthesized Peptide
QPHPPPAF

SEQ ID NO: 2260 - protein, 9 aa, Artificial Sequence
  Artificially Synthesized Peptide
QPPICTIDV

SEQ ID NO: 2261 - protein, 10 aa, Artificial Sequence
  Artificially Synthesized Peptide
QPPICTIDVY

SEQ ID NO: 2262 - protein, 11 aa, Artificial Sequence
  Artificially Synthesized Peptide
QPPICTIDVYM

SEQ ID NO: 2263 - protein, 10 aa, Artificial Sequence
  Artificially Synthesized Peptide
QPQNGSVTCF

SEQ ID NO: 2264 - protein, 9 aa, Artificial Sequence
  Artificially Synthesized Peptide
QQKIRKYTM

SEQ ID NO: 2265 - protein, 8 aa, Artificial Sequence
  Artificially Synthesized Peptide
QVCTGTDM

SEQ ID NO: 2266 - protein, 9 aa, Artificial Sequence
  Artificially Synthesized Peptide
QVFETLEEI

SEQ ID NO: 2267 - protein, 9 aa, Artificial Sequence
  Artificially Synthesized Peptide
QVPLQRLRI

SEQ ID NO: 2268 - protein, 10 aa, Artificial Sequence
  Artificially Synthesized Peptide
QVPLQRLRIV

SEQ ID NO: 2269 - protein, 11 aa, Artificial Sequence
  Artificially Synthesized Peptide
QVVQGNLELTY

SEQ ID NO: 2270 - protein, 8 aa, Artificial Sequence
  Artificially Synthesized Peptide
RILHNGAY

SEQ ID NO: 2271 - protein, 11 aa, Artificial Sequence
  Artificially Synthesized Peptide
RILKETELRKV

SEQ ID NO: 2272 - protein, 9 aa, Artificial Sequence
  Artificially Synthesized Peptide
RIVRGTQLF

SEQ ID NO: 2273 - protein, 10 aa, Artificial Sequence
  Artificially Synthesized Peptide
RLGSQDLLNW

SEQ ID NO: 2274 - protein, 10 aa, Artificial Sequence
  Artificially Synthesized Peptide
RLLDIDETEY

SEQ ID NO: 2275 - protein, 11 aa, Artificial Sequence
  Artificially Synthesized Peptide
RLLGICLTSTV

SEQ ID NO: 2276 - protein, 9 aa, Artificial Sequence
  Artificially Synthesized Peptide
RLLQETELV

SEQ ID NO: 2277 - protein, 10 aa, Artificial Sequence
  Artificially Synthesized Peptide
RLPQPPICTI

SEQ ID NO: 2278 - protein, 11 aa, Artificial Sequence
  Artificially Synthesized Peptide
RLRIVRGTQLF

SEQ ID NO: 2279 - protein, 9 aa, Artificial Sequence
  Artificially Synthesized Peptide
RMARDPQRF

SEQ ID NO: 2280 - protein, 10 aa, Artificial Sequence
  Artificially Synthesized Peptide
RMARDPQRFV

SEQ ID NO: 2281 - protein, 11 aa, Artificial Sequence
  Artificially Synthesized Peptide
RMARDPQRFVV

SEQ ID NO: 2282 - protein, 8 aa, Artificial Sequence
  Artificially Synthesized Peptide
RPRFRELV

SEQ ID NO: 2283 - protein, 11 aa, Artificial Sequence
  Artificially Synthesized Peptide
RPRFRELVSEF

SEQ ID NO: 2284 - protein, 8 aa, Artificial Sequence
  Artificially Synthesized Peptide
RQQKIRKY

SEQ ID NO: 2285 - protein, 10 aa, Artificial Sequence
  Artificially Synthesized Peptide
RQQKIRKYTM

SEQ ID NO: 2286 - protein, 10 aa, Artificial Sequence
  Artificially Synthesized Peptide
RQVPLQRLRI

SEQ ID NO: 2287 - protein, 11 aa, Artificial Sequence
  Artificially Synthesized Peptide
RQVPLQRLRIV

SEQ ID NO: 2288 - protein, 8 aa, Artificial Sequence
  Artificially Synthesized Peptide
RVCYGLGM

SEQ ID NO: 2289 - protein, 10 aa, Artificial Sequence
  Artificially Synthesized Peptide
RVLQGLPREY

SEQ ID NO: 2290 - protein, 11 aa, Artificial Sequence
  Artificially Synthesized Peptide
RVLQGLPREYV

SEQ ID NO: 2291 - protein, 9 aa, Artificial Sequence
  Artificially Synthesized Peptide
SIISAVVGI

SEQ ID NO: 2292 - protein, 9 aa, Artificial Sequence
  Artificially Synthesized Peptide
SLAFLPESF

SEQ ID NO: 2293 - protein, 8 aa, Artificial Sequence
  Artificially Synthesized Peptide
SLLEDDDM

SEQ ID NO: 2294 - protein, 8 aa, Artificial Sequence
  Artificially Synthesized Peptide
SLPDLSVF

SEQ ID NO: 2295 - protein, 8 aa, Artificial Sequence
  Artificially Synthesized Peptide
SLSFLQDI

SEQ ID NO: 2296 - protein, 11 aa, Artificial Sequence
  Artificially Synthesized Peptide
SLSFLQDIQEV

SEQ ID NO: 2297 - protein, 10 aa, Artificial Sequence
  Artificially Synthesized Peptide
SLTEILKGGV

SEQ ID NO: 2298 - protein, 9 aa, Artificial Sequence
  Artificially Synthesized Peptide
SLTLQGLGI

SEQ ID NO: 2299 - protein, 11 aa, Artificial Sequence
  Artificially Synthesized Peptide
SLTLQGLGISW

SEQ ID NO: 2300 - protein, 9 aa, Artificial Sequence
  Artificially Synthesized Peptide
SMPNPEGRY

SEQ ID NO: 2301 - protein, 11 aa, Artificial Sequence
  Artificially Synthesized Peptide
SMPNPEGRYTF

SEQ ID NO: 2302 - protein, 8 aa, Artificial Sequence
  Artificially Synthesized Peptide
SPAFDNLY

SEQ ID NO: 2303 - protein, 9 aa, Artificial Sequence
  Artificially Synthesized Peptide
SPAFDNLYY

SEQ ID NO: 2304 - protein, 10 aa, Artificial Sequence
  Artificially Synthesized Peptide
SPAFDNLYYW

SEQ ID NO: 2305 - protein, 8 aa, Artificial Sequence
  Artificially Synthesized Peptide
SPETHLDM

SEQ ID NO: 2306 - protein, 8 aa, Artificial Sequence
  Artificially Synthesized Peptide
SPGKNGVV

SEQ ID NO: 2307 - protein, 11 aa, Artificial Sequence
  Artificially Synthesized Peptide
SPGKNGVVKDV

SEQ ID NO: 2308 - protein, 8 aa, Artificial Sequence
  Artificially Synthesized Peptide
SPKANKEI

SEQ ID NO: 2309 - protein, 8 aa, Artificial Sequence
  Artificially Synthesized Peptide
SPLDSTFY

SEQ ID NO: 2310 - protein, 10 aa, Artificial Sequence
  Artificially Synthesized Peptide
SPLTSIISAV

SEQ ID NO: 2311 - protein, 11 aa, Artificial Sequence
  Artificially Synthesized Peptide
SPLTSIISAVV

SEQ ID NO: 2312 - protein, 10 aa, Artificial Sequence
  Artificially Synthesized Peptide
SPMCKGSRCW

SEQ ID NO: 2313 - protein, 10 aa, Artificial Sequence
  Artificially Synthesized Peptide
SPNHVKITDF

SEQ ID NO: 2314 - protein, 10 aa, Artificial Sequence
  Artificially Synthesized Peptide
SPYVSRLLGI

SEQ ID NO: 2315 - protein, 9 aa, Artificial Sequence
  Artificially Synthesized Peptide
SQDLLNWCM

SEQ ID NO: 2316 - protein, 11 aa, Artificial Sequence
  Artificially Synthesized Peptide
SQDLLNWCMQI

SEQ ID NO: 2317 - protein, 10 aa, Artificial Sequence
  Artificially Synthesized Peptide
SQFLRGQECV

SEQ ID NO: 2318 - protein, 8 aa, Artificial Sequence
  Artificially Synthesized Peptide
SVFQNLQV

SEQ ID NO: 2319 - protein, 9 aa, Artificial Sequence
  Artificially Synthesized Peptide
SVFQNLQVI

SEQ ID NO: 2320 - protein, 8 aa, Artificial Sequence
  Artificially Synthesized Peptide
TIDVYMIM

SEQ ID NO: 2321 - protein, 9 aa, Artificial Sequence
  Artificially Synthesized Peptide
TIDVYMIMV

SEQ ID NO: 2322 - protein, 8 aa, Artificial Sequence
  Artificially Synthesized Peptide
TILWKDIF

SEQ ID NO: 2323 - protein, 8 aa, Artificial Sequence
  Artificially Synthesized Peptide
TLEEITGY

SEQ ID NO: 2324 - protein, 10 aa, Artificial Sequence
  Artificially Synthesized Peptide
TLEEITGYLY

SEQ ID NO: 2325 - protein, 11 aa, Artificial Sequence
  Artificially Synthesized Peptide
TLEEITGYLYI

SEQ ID NO: 2326 - protein, 9 aa, Artificial Sequence
  Artificially Synthesized Peptide
TLQGLGISW

SEQ ID NO: 2327 - protein, 9 aa, Artificial Sequence
  Artificially Synthesized Peptide
TLSPGKNGV

SEQ ID NO: 2328 - protein, 10 aa, Artificial Sequence
  Artificially Synthesized Peptide
TLSPGKNGVV

SEQ ID NO: 2329 - protein, 11 aa, Artificial Sequence
  Artificially Synthesized Peptide
TLVCPLHNQEV

SEQ ID NO: 2330 - protein, 9 aa, Artificial Sequence
  Artificially Synthesized Peptide
TPTAENPEY

SEQ ID NO: 2331 - protein, 9 aa, Artificial Sequence
  Artificially Synthesized Peptide
TQCVNCSQF

SEQ ID NO: 2332 - protein, 8 aa, Artificial Sequence
  Artificially Synthesized Peptide
TQLFEDNY

SEQ ID NO: 2333 - protein, 9 aa, Artificial Sequence
  Artificially Synthesized Peptide
TQVCTGTDM

SEQ ID NO: 2334 - protein, 11 aa, Artificial Sequence
  Artificially Synthesized Peptide
TVPLPSETDGY

SEQ ID NO: 2335 - protein, 8 aa, Artificial Sequence
  Artificially Synthesized Peptide
TVPWDQLF

SEQ ID NO: 2336 - protein, 9 aa, Artificial Sequence
  Artificially Synthesized Peptide
TVQLVTQLM

SEQ ID NO: 2337 - protein, 11 aa, Artificial Sequence
  Artificially Synthesized Peptide
TVQLVTQLMPY

SEQ ID NO: 2338 - protein, 8 aa, Artificial Sequence
  Artificially Synthesized Peptide
TVWELMTF

SEQ ID NO: 2339 - protein, 8 aa, Artificial Sequence
  Artificially Synthesized Peptide
TVYKGIWI

SEQ ID NO: 2340 - protein, 10 aa, Artificial Sequence
  Artificially Synthesized Peptide
VLGSGAFGTV

SEQ ID NO: 2341 - protein, 11 aa, Artificial Sequence
  Artificially Synthesized Peptide
VLGSGAFGTVY

SEQ ID NO: 2342 - protein, 8 aa, Artificial Sequence
  Artificially Synthesized Peptide
VLGVVFGI

SEQ ID NO: 2343 - protein, 10 aa, Artificial Sequence
  Artificially Synthesized Peptide
VLGVVFGILI

SEQ ID NO: 2344 - protein, 8 aa, Artificial Sequence
  Artificially Synthesized Peptide
VLIAHNQV

SEQ ID NO: 2345 - protein, 11 aa, Artificial Sequence
  Artificially Synthesized Peptide
VLIAHNQVRQV

SEQ ID NO: 2346 - protein, 11 aa, Artificial Sequence
  Artificially Synthesized Peptide
VLIQRNPQLCY

SEQ ID NO: 2347 - protein, 9 aa, Artificial Sequence
  Artificially Synthesized Peptide
VLQGLPREY

SEQ ID NO: 2348 - protein, 10 aa, Artificial Sequence
  Artificially Synthesized Peptide
VLQGLPREYV

SEQ ID NO: 2349 - protein, 9 aa, Artificial Sequence
  Artificially Synthesized Peptide
VLVKSPNHV

SEQ ID NO: 2350 - protein, 11 aa, Artificial Sequence
  Artificially Synthesized Peptide
VLVKSPNHVKI

SEQ ID NO: 2351 - protein, 9 aa, Artificial Sequence
  Artificially Synthesized Peptide
VMAGVGSPY

SEQ ID NO: 2352 - protein, 10 aa, Artificial Sequence
  Artificially Synthesized Peptide
VMAGVGSPYV

SEQ ID NO: 2353 - protein, 11 aa, Artificial Sequence
  Artificially Synthesized Peptide
VPIKWMALESI

SEQ ID NO: 2354 - protein, 10 aa, Artificial Sequence
  Artificially Synthesized Peptide
VPLPSETDGY

SEQ ID NO: 2355 - protein, 11 aa, Artificial Sequence
  Artificially Synthesized Peptide
VPLPSETDGYV

SEQ ID NO: 2356 - protein, 8 aa, Artificial Sequence
  Artificially Synthesized Peptide
VPLQRLRI

SEQ ID NO: 2357 - protein, 9 aa, Artificial Sequence
  Artificially Synthesized Peptide
VPLQRLRIV

SEQ ID NO: 2358 - protein, 9 aa, Artificial Sequence
  Artificially Synthesized Peptide
VQGNLELTY

SEQ ID NO: 2359 - protein, 8 aa, Artificial Sequence
  Artificially Synthesized Peptide
VQLVTQLM

SEQ ID NO: 2360 - protein, 10 aa, Artificial Sequence
  Artificially Synthesized Peptide
VQLVTQLMPY

SEQ ID NO: 2361 - protein, 8 aa, Artificial Sequence
  Artificially Synthesized Peptide
VVGILLVV

SEQ ID NO: 2362 - protein, 9 aa, Artificial Sequence
  Artificially Synthesized Peptide
VVGILLVVV

SEQ ID NO: 2363 - protein, 8 aa, Artificial Sequence
  Artificially Synthesized Peptide
VVKDVFAF

SEQ ID NO: 2364 - protein, 9 aa, Artificial Sequence
  Artificially Synthesized Peptide
VVLGVVFGI

SEQ ID NO: 2365 - protein, 11 aa, Artificial Sequence
  Artificially Synthesized Peptide
VVLGVVFGILI

SEQ ID NO: 2366 - protein, 10 aa, Artificial Sequence
  Artificially Synthesized Peptide
VVQGNLELTY

SEQ ID NO: 2367 - protein, 8 aa, Artificial Sequence
  Artificially Synthesized Peptide
VVVLGVVF

SEQ ID NO: 2368 - protein, 10 aa, Artificial Sequence
  Artificially Synthesized Peptide
VVVLGVVFGI

SEQ ID NO: 2369 - protein, 8 aa, Artificial Sequence
  Artificially Synthesized Peptide
WIPDGENV

SEQ ID NO: 2370 - protein, 10 aa, Artificial Sequence
  Artificially Synthesized Peptide
WIPDGENVKI

SEQ ID NO: 2371 - protein, 11 aa, Artificial Sequence
  Artificially Synthesized Peptide
WMIDSECRPRF

SEQ ID NO: 2372 - protein, 10 aa, Artificial Sequence
  Artificially Synthesized Peptide
WPDSLPDLSV

SEQ ID NO: 2373 - protein, 11 aa, Artificial Sequence
  Artificially Synthesized Peptide
WPDSLPDLSVF

SEQ ID NO: 2374 - protein, 8 aa, Artificial Sequence
  Artificially Synthesized Peptide
YLEDVRLV

SEQ ID NO: 2375 - protein, 8 aa, Artificial Sequence
  Artificially Synthesized Peptide
YLGLDVPV

SEQ ID NO: 2376 - protein, 10 aa, Artificial Sequence
  Artificially Synthesized Peptide
YLPTNASLSF

SEQ ID NO: 2377 - protein, 8 aa, Artificial Sequence
  Artificially Synthesized Peptide
YLVPQQGF

SEQ ID NO: 2378 - protein, 9 aa, Artificial Sequence
  Artificially Synthesized Peptide
YLVPQQGFF

SEQ ID NO: 2379 - protein, 8 aa, Artificial Sequence
  Artificially Synthesized Peptide
YMIMVKCW

SEQ ID NO: 2380 - protein, 9 aa, Artificial Sequence
  Artificially Synthesized Peptide
YMIMVKCWM

SEQ ID NO: 2381 - protein, 10 aa, Artificial Sequence
  Artificially Synthesized Peptide
YMIMVKCWMI

SEQ ID NO: 2382 - protein, 10 aa, Artificial Sequence
  Artificially Synthesized Peptide
YQDTILWKDI

SEQ ID NO: 2383 - protein, 11 aa, Artificial Sequence
  Artificially Synthesized Peptide
YQDTILWKDIF

SEQ ID NO: 2384 - protein, 9 aa, Artificial Sequence
  Artificially Synthesized Peptide
YVLIAHNQV

SEQ ID NO: 2385 - protein, 10 aa, Artificial Sequence
  Artificially Synthesized Peptide
YVMAGVGSPY

SEQ ID NO: 2386 - protein, 11 aa, Artificial Sequence
  Artificially Synthesized Peptide
YVMAGVGSPYV

SEQ ID NO: 2387 - protein, 8 aa, Artificial Sequence
  Artificially Synthesized Peptide
YVSRLLGI

SEQ ID NO: 2388 - protein, 10 aa, Artificial Sequence
  Artificially Synthesized Peptide
AFSPAFDNLY

SEQ ID NO: 2389 - protein, 11 aa, Artificial Sequence
  Artificially Synthesized Peptide
AFSPAFDNLYY

SEQ ID NO: 2390 - protein, 9 aa, Artificial Sequence
  Artificially Synthesized Peptide
ASCVTACPY

SEQ ID NO: 2391 - protein, 11 aa, Artificial Sequence
  Artificially Synthesized Peptide
ASCVTACPYNY

SEQ ID NO: 2392 - protein, 9 aa, Artificial Sequence
  Artificially Synthesized Peptide
ASPLDSTFY

SEQ ID NO: 2393 - protein, 10 aa, Artificial Sequence
  Artificially Synthesized Peptide
CMQIAKGMSY

SEQ ID NO: 2394 - protein, 11 aa, Artificial Sequence
  Artificially Synthesized Peptide
CPSGVKPDLSY

SEQ ID NO: 2395 - protein, 10 aa, Artificial Sequence
  Artificially Synthesized Peptide
CSKPCARVCY

SEQ ID NO: 2396 - protein, 11 aa, Artificial Sequence
  Artificially Synthesized Peptide
DMGDLVDAEEY

SEQ ID NO: 2397 - protein, 8 aa, Artificial Sequence
  Artificially Synthesized Peptide
DPSPLQRY

SEQ ID NO: 2398 - protein, 11 aa, Artificial Sequence
  Artificially Synthesized Peptide
EADQCVACAHY

SEQ ID NO: 2399 - protein, 10 aa, Artificial Sequence
  Artificially Synthesized Peptide
ESMPNPEGRY

SEQ ID NO: 2400 - protein, 11 aa, Artificial Sequence
  Artificially Synthesized Peptide
ETHLDMLRHLY

SEQ ID NO: 2401 - protein, 9 aa, Artificial Sequence
  Artificially Synthesized Peptide
ETLEEITGY

SEQ ID NO: 2402 - protein, 11 aa, Artificial Sequence
  Artificially Synthesized Peptide
ETLEEITGYLY

SEQ ID NO: 2403 - protein, 11 aa, Artificial Sequence
  Artificially Synthesized Peptide
FESMPNPEGRY

SEQ ID NO: 2404 - protein, 11 aa, Artificial Sequence
  Artificially Synthesized Peptide
FGASCVTACPY

SEQ ID NO: 2405 - protein, 9 aa, Artificial Sequence
  Artificially Synthesized Peptide
FSPAFDNLY

SEQ ID NO: 2406 - protein, 10 aa, Artificial Sequence
  Artificially Synthesized Peptide
FSPAFDNLYY

SEQ ID NO: 2407 - protein, 10 aa, Artificial Sequence
  Artificially Synthesized Peptide
FTHQSDVWSY

SEQ ID NO: 2408 - protein, 10 aa, Artificial Sequence
  Artificially Synthesized Peptide
GASCVTACPY

SEQ ID NO: 2409 - protein, 9 aa, Artificial Sequence
  Artificially Synthesized Peptide
GGAVENPEY

SEQ ID NO: 2410 - protein, 11 aa, Artificial Sequence
  Artificially Synthesized Peptide
GPASPLDSTFY

SEQ ID NO: 2411 - protein, 9 aa, Artificial Sequence
  Artificially Synthesized Peptide
GSGAFGTVY

SEQ ID NO: 2412 - protein, 10 aa, Artificial Sequence
  Artificially Synthesized Peptide
GTPTAENPEY

SEQ ID NO: 2413 - protein, 9 aa, Artificial Sequence
  Artificially Synthesized Peptide
GTQLFEDNY

SEQ ID NO: 2414 - protein, 9 aa, Artificial Sequence
  Artificially Synthesized Peptide
HLDMLRHLY

SEQ ID NO: 2415 - protein, 8 aa, Artificial Sequence
  Artificially Synthesized Peptide
HQSDVWSY

SEQ ID NO: 2416 - protein, 11 aa, Artificial Sequence
  Artificially Synthesized Peptide
KCSKPCARVCY

SEQ ID NO: 2417 - protein, 9 aa, Artificial Sequence
  Artificially Synthesized Peptide
LEEITGYLY

SEQ ID NO: 2418 - protein, 10 aa, Artificial Sequence
  Artificially Synthesized Peptide
LGSGAFGTVY

SEQ ID NO: 2419 - protein, 9 aa, Artificial Sequence
  Artificially Synthesized Peptide
LLDIDETEY

SEQ ID NO: 2420 - protein, 9 aa, Artificial Sequence
  Artificially Synthesized Peptide
LMTFGAKPY

SEQ ID NO: 2421 - protein, 8 aa, Artificial Sequence
  Artificially Synthesized Peptide
LPSETDGY

SEQ ID NO: 2422 - protein, 10 aa, Artificial Sequence
  Artificially Synthesized Peptide
LQDIQEVQGY

SEQ ID NO: 2423 - protein, 9 aa, Artificial Sequence
  Artificially Synthesized Peptide
LTCSPQPEY

SEQ ID NO: 2424 - protein, 10 aa, Artificial Sequence
  Artificially Synthesized Peptide
MGDLVDAEEY

SEQ ID NO: 2425 - protein, 8 aa, Artificial Sequence
  Artificially Synthesized Peptide
MTFGAKPY

SEQ ID NO: 2426 - protein, 9 aa, Artificial Sequence
  Artificially Synthesized Peptide
NKEILDEAY

SEQ ID NO: 2427 - protein, 10 aa, Artificial Sequence
  Artificially Synthesized Peptide
PASPLDSTFY

SEQ ID NO: 2428 - protein, 10 aa, Artificial Sequence
  Artificially Synthesized Peptide
PSGVKPDLSY

SEQ ID NO: 2429 - protein, 8 aa, Artificial Sequence
  Artificially Synthesized Peptide
PTAENPEY

SEQ ID NO: 2430 - protein, 11 aa, Artificial Sequence
  Artificially Synthesized Peptide
PTHDPSPLQRY

SEQ ID NO: 2431 - protein, 8 aa, Artificial Sequence
  Artificially Synthesized Peptide
QIAKGMSY

SEQ ID NO: 2432 - protein, 8 aa, Artificial Sequence
  Artificially Synthesized Peptide
SGAFGTVY

SEQ ID NO: 2433 - protein, 9 aa, Artificial Sequence
  Artificially Synthesized Peptide
SMPNPEGRY

SEQ ID NO: 2434 - protein, 8 aa, Artificial Sequence
  Artificially Synthesized Peptide
SPAFDNLY

SEQ ID NO: 2435 - protein, 9 aa, Artificial Sequence
  Artificially Synthesized Peptide
SPAFDNLYY

SEQ ID NO: 2436 - protein, 8 aa, Artificial Sequence
  Artificially Synthesized Peptide
TCSPQPEY

SEQ ID NO: 2437 - protein, 10 aa, Artificial Sequence
  Artificially Synthesized Peptide
THDPSPLQRY

SEQ ID NO: 2438 - protein, 8 aa, Artificial Sequence
  Artificially Synthesized Peptide
TLEEITGY

SEQ ID NO: 2439 - protein, 10 aa, Artificial Sequence
  Artificially Synthesized Peptide
TLEEITGYLY

SEQ ID NO: 2440 - protein, 11 aa, Artificial Sequence
  Artificially Synthesized Peptide
VFETLEEITGY

SEQ ID NO: 2441 - protein, 9 aa, Artificial Sequence
  Artificially Synthesized Peptide
VMAGVGSPY

SEQ ID NO: 2442 - protein, 8 aa, Artificial Sequence
  Artificially Synthesized Peptide
VTACPYNY

SEQ ID NO: 2443 - protein, 8 aa, Artificial Sequence
  Artificially Synthesized Peptide
AAGCTGPK

SEQ ID NO: 2444 - protein, 9 aa, Artificial Sequence
  Artificially Synthesized Peptide
AAGCTGPKH

SEQ ID NO: 2445 - protein, 11 aa, Artificial Sequence
  Artificially Synthesized Peptide
AAKGLQSLPTH

SEQ ID NO: 2446 - protein, 11 aa, Artificial Sequence
  Artificially Synthesized Peptide
AALCRWGLLLA

SEQ ID NO: 2447 - protein, 10 aa, Artificial Sequence
  Artificially Synthesized Peptide
AAPQPHPPPA

SEQ ID NO: 2448 - protein, 11 aa, Artificial Sequence
  Artificially Synthesized Peptide
AAPQPHPPPAF

SEQ ID NO: 2449 - protein, 8 aa, Artificial Sequence
  Artificially Synthesized Peptide
AARNVLVK

SEQ ID NO: 2450 - protein, 11 aa, Artificial Sequence
  Artificially Synthesized Peptide
AARPAGATLER

SEQ ID NO: 2451 - protein, 10 aa, Artificial Sequence
  Artificially Synthesized Peptide
ACAHYKDPPF

SEQ ID NO: 2452 - protein, 10 aa, Artificial Sequence
  Artificially Synthesized Peptide
ACHPCSPMCK

SEQ ID NO: 2453 - protein, 8 aa, Artificial Sequence
  Artificially Synthesized Peptide
ACHQLCAR

SEQ ID NO: 2454 - protein, 10 aa, Artificial Sequence
  Artificially Synthesized Peptide
ACHQLCARGH

SEQ ID NO: 2455 - protein, 11 aa, Artificial Sequence
  Artificially Synthesized Peptide
ACQPCPINCTH

SEQ ID NO: 2456 - protein, 9 aa, Artificial Sequence
  Artificially Synthesized Peptide
ADGGKVPIK

SEQ ID NO: 2457 - protein, 8 aa, Artificial Sequence
  Artificially Synthesized Peptide
ADQCVACA

SEQ ID NO: 2458 - protein, 9 aa, Artificial Sequence
  Artificially Synthesized Peptide
ADQCVACAH

SEQ ID NO: 2459 - protein, 10 aa, Artificial Sequence
  Artificially Synthesized Peptide
ADQCVACAHY

SEQ ID NO: 2460 - protein, 11 aa, Artificial Sequence
  Artificially Synthesized Peptide
ADQCVACAHYK

SEQ ID NO: 2461 - protein, 11 aa, Artificial Sequence
  Artificially Synthesized Peptide
AFGGAVENPEY

SEQ ID NO: 2462 - protein, 10 aa, Artificial Sequence
  Artificially Synthesized Peptide
AFSPAFDNLY

SEQ ID NO: 2463 - protein, 11 aa, Artificial Sequence
  Artificially Synthesized Peptide
AFSPAFDNLYY

SEQ ID NO: 2464 - protein, 9 aa, Artificial Sequence
  Artificially Synthesized Peptide
AGATLERPK

SEQ ID NO: 2465 - protein, 11 aa, Artificial Sequence
  Artificially Synthesized Peptide
AGCKKIFGSLA

SEQ ID NO: 2466 - protein, 8 aa, Artificial Sequence
  Artificially Synthesized Peptide
AGCTGPKH

SEQ ID NO: 2467 - protein, 8 aa, Artificial Sequence
  Artificially Synthesized Peptide
AGGCARCK

SEQ ID NO: 2468 - protein, 8 aa, Artificial Sequence
  Artificially Synthesized Peptide
AGGMVHHR

SEQ ID NO: 2469 - protein, 9 aa, Artificial Sequence
  Artificially Synthesized Peptide
AGGMVHHRH

SEQ ID NO: 2470 - protein, 10 aa, Artificial Sequence
  Artificially Synthesized Peptide
AGGMVHHRHR

SEQ ID NO: 2471 - protein, 10 aa, Artificial Sequence
  Artificially Synthesized Peptide
AGVGSPYVSR

SEQ ID NO: 2472 - protein, 10 aa, Artificial Sequence
  Artificially Synthesized Peptide
ALCRWGLLLA

SEQ ID NO: 2473 - protein, 8 aa, Artificial Sequence
  Artificially Synthesized Peptide
ALESILRR

SEQ ID NO: 2474 - protein, 9 aa, Artificial Sequence
  Artificially Synthesized Peptide
ALESILRRR

SEQ ID NO: 2475 - protein, 10 aa, Artificial Sequence
  Artificially Synthesized Peptide
ALESILRRRF

SEQ ID NO: 2476 - protein, 8 aa, Artificial Sequence
  Artificially Synthesized Peptide
ALIHHNTH

SEQ ID NO: 2477 - protein, 11 aa, Artificial Sequence
  Artificially Synthesized Peptide
ALIHHNTHLCF

SEQ ID NO: 2478 - protein, 8 aa, Artificial Sequence
  Artificially Synthesized Peptide
ALLHTANR

SEQ ID NO: 2479 - protein, 8 aa, Artificial Sequence
  Artificially Synthesized Peptide
ALLPPGAA

SEQ ID NO: 2480 - protein, 9 aa, Artificial Sequence
  Artificially Synthesized Peptide
ALTLIDTNR

SEQ ID NO: 2481 - protein, 11 aa, Artificial Sequence
  Artificially Synthesized Peptide
ALTLIDTNRSR

SEQ ID NO: 2482 - protein, 10 aa, Artificial Sequence
  Artificially Synthesized Peptide
ALVTYNTDTF

SEQ ID NO: 2483 - protein, 9 aa, Artificial Sequence
  Artificially Synthesized Peptide
AMPNQAQMR

SEQ ID NO: 2484 - protein, 9 aa, Artificial Sequence
  Artificially Synthesized Peptide
ASCVTACPY

SEQ ID NO: 2485 - protein, 11 aa, Artificial Sequence
  Artificially Synthesized Peptide
ASCVTACPYNY

SEQ ID NO: 2486 - protein, 11 aa, Artificial Sequence
  Artificially Synthesized Peptide
ASPETHLDMLR

SEQ ID NO: 2487 - protein, 8 aa, Artificial Sequence
  Artificially Synthesized Peptide
ASPLDSTF

SEQ ID NO: 2488 - protein, 9 aa, Artificial Sequence
  Artificially Synthesized Peptide
ASPLDSTFY

SEQ ID NO: 2489 - protein, 10 aa, Artificial Sequence
  Artificially Synthesized Peptide
ASPLDSTFYR

SEQ ID NO: 2490 - protein, 10 aa, Artificial Sequence
  Artificially Synthesized Peptide
ASPLTSIISA

SEQ ID NO: 2491 - protein, 10 aa, Artificial Sequence
  Artificially Synthesized Peptide
AVTSANIQEF

SEQ ID NO: 2492 - protein, 11 aa, Artificial Sequence
  Artificially Synthesized Peptide
AVTSANIQEFA

SEQ ID NO: 2493 - protein, 9 aa, Artificial Sequence
  Artificially Synthesized Peptide
CAAGCTGPK

SEQ ID NO: 2494 - protein, 10 aa, Artificial Sequence
  Artificially Synthesized Peptide
CAAGCTGPKH

SEQ ID NO: 2495 - protein, 9 aa, Artificial Sequence
  Artificially Synthesized Peptide
CAGGCARCK

SEQ ID NO: 2496 - protein, 9 aa, Artificial Sequence
  Artificially Synthesized Peptide
CAHYKDPPF

SEQ ID NO: 2497 - protein, 8 aa, Artificial Sequence
  Artificially Synthesized Peptide
CCHEQCAA

SEQ ID NO: 2498 - protein, 11 aa, Artificial Sequence
  Artificially Synthesized Peptide
CFGPEADQCVA

SEQ ID NO: 2499 - protein, 9 aa, Artificial Sequence
  Artificially Synthesized Peptide
CLACLHFNH

SEQ ID NO: 2500 - protein, 10 aa, Artificial Sequence
  Artificially Synthesized Peptide
CLLDHVRENR

SEQ ID NO: 2501 - protein, 10 aa, Artificial Sequence
  Artificially Synthesized Peptide
CMQIAKGMSY

SEQ ID NO: 2502 - protein, 10 aa, Artificial Sequence
  Artificially Synthesized Peptide
CSKPCARVCY

SEQ ID NO: 2503 - protein, 9 aa, Artificial Sequence
  Artificially Synthesized Peptide
CSPMCKGSR

SEQ ID NO: 2504 - protein, 11 aa, Artificial Sequence
  Artificially Synthesized Peptide
CTGPKHSDCLA

SEQ ID NO: 2505 - protein, 9 aa, Artificial Sequence
  Artificially Synthesized Peptide
CTGTDMKLR

SEQ ID NO: 2506 - protein, 11 aa, Artificial Sequence
  Artificially Synthesized Peptide
CTHSCVDLDDK

SEQ ID NO: 2507 - protein, 11 aa, Artificial Sequence
  Artificially Synthesized Peptide
CTIDVYMIMVK

SEQ ID NO: 2508 - protein, 8 aa, Artificial Sequence
  Artificially Synthesized Peptide
CTLVCPLH

SEQ ID NO: 2509 - protein, 8 aa, Artificial Sequence
  Artificially Synthesized Peptide
CVACAHYK

SEQ ID NO: 2510 - protein, 10 aa, Artificial Sequence
  Artificially Synthesized Peptide
CVARCPSGVK

SEQ ID NO: 2511 - protein, 11 aa, Artificial Sequence
  Artificially Synthesized Peptide
CVDLDDKGCPA

SEQ ID NO: 2512 - protein, 9 aa, Artificial Sequence
  Artificially Synthesized Peptide
CVGEGLACH

SEQ ID NO: 2513 - protein, 9 aa, Artificial Sequence
  Artificially Synthesized Peptide
CVNCSQFLR

SEQ ID NO: 2514 - protein, 9 aa, Artificial Sequence
  Artificially Synthesized Peptide
CVTACPYNY

SEQ ID NO: 2515 - protein, 8 aa, Artificial Sequence
  Artificially Synthesized Peptide
DCCHEQCA

SEQ ID NO: 2516 - protein, 9 aa, Artificial Sequence
  Artificially Synthesized Peptide
DCCHEQCAA

SEQ ID NO: 2517 - protein, 8 aa, Artificial Sequence
  Artificially Synthesized Peptide
DCLACLHF

SEQ ID NO: 2518 - protein, 10 aa, Artificial Sequence
  Artificially Synthesized Peptide
DCLACLHFNH

SEQ ID NO: 2519 - protein, 11 aa, Artificial Sequence
  Artificially Synthesized Peptide
DCQSLTRTVCA

SEQ ID NO: 2520 - protein, 10 aa, Artificial Sequence
  Artificially Synthesized Peptide
DDDMGDLVDA

SEQ ID NO: 2521 - protein, 10 aa, Artificial Sequence
  Artificially Synthesized Peptide
DDKGCPAEQR

SEQ ID NO: 2522 - protein, 11 aa, Artificial Sequence
  Artificially Synthesized Peptide
DDKGCPAEQRA

SEQ ID NO: 2523 - protein, 9 aa, Artificial Sequence
  Artificially Synthesized Peptide
DDMGDLVDA

SEQ ID NO: 2524 - protein, 8 aa, Artificial Sequence
  Artificially Synthesized Peptide
DGDLGMGA

SEQ ID NO: 2525 - protein, 9 aa, Artificial Sequence
  Artificially Synthesized Peptide
DGDLGMGAA

SEQ ID NO: 2526 - protein, 10 aa, Artificial Sequence
  Artificially Synthesized Peptide
DGDLGMGAAK

SEQ ID NO: 2527 - protein, 9 aa, Artificial Sequence
  Artificially Synthesized Peptide
DGDPASNTA

SEQ ID NO: 2528 - protein, 10 aa, Artificial Sequence
  Artificially Synthesized Peptide
DGENVKIPVA

SEQ ID NO: 2529 - protein, 8 aa, Artificial Sequence
  Artificially Synthesized Peptide
DGGKVPIK

SEQ ID NO: 2530 - protein, 11 aa, Artificial Sequence
  Artificially Synthesized Peptide
DGGKVPIKWMA

SEQ ID NO: 2531 - protein, 8 aa, Artificial Sequence
  Artificially Synthesized Peptide
DGTQRCEK

SEQ ID NO: 2532 - protein, 11 aa, Artificial Sequence
  Artificially Synthesized Peptide
DGTQRCEKCSK

SEQ ID NO: 2533 - protein, 8 aa, Artificial Sequence
  Artificially Synthesized Peptide
DIDETEYH

SEQ ID NO: 2534 - protein, 9 aa, Artificial Sequence
  Artificially Synthesized Peptide
DIDETEYHA

SEQ ID NO: 2535 - protein, 10 aa, Artificial Sequence
  Artificially Synthesized Peptide
DIFHKNNQLA

SEQ ID NO: 2536 - protein, 8 aa, Artificial Sequence
  Artificially Synthesized Peptide
DIQEVQGY

SEQ ID NO: 2537 - protein, 10 aa, Artificial Sequence
  Artificially Synthesized Peptide
DLAARNVLVK

SEQ ID NO: 2538 - protein, 9 aa, Artificial Sequence
  Artificially Synthesized Peptide
DLDDKGCPA

SEQ ID NO: 2539 - protein, 8 aa, Artificial Sequence
  Artificially Synthesized Peptide
DLGMGAAK

SEQ ID NO: 2540 - protein, 8 aa, Artificial Sequence
  Artificially Synthesized Peptide
DLLEKGER

SEQ ID NO: 2541 - protein, 10 aa, Artificial Sequence
  Artificially Synthesized Peptide
DLLNWCMQIA

SEQ ID NO: 2542 - protein, 11 aa, Artificial Sequence
  Artificially Synthesized Peptide
DLLNWCMQIAK

SEQ ID NO: 2543 - protein, 9 aa, Artificial Sequence
  Artificially Synthesized Peptide
DLSYMPIWK

SEQ ID NO: 2544 - protein, 10 aa, Artificial Sequence
  Artificially Synthesized Peptide
DLSYMPIWKF

SEQ ID NO: 2545 - protein, 8 aa, Artificial Sequence
  Artificially Synthesized Peptide
DLVDAEEY

SEQ ID NO: 2546 - protein, 8 aa, Artificial Sequence
  Artificially Synthesized Peptide
DMGDLVDA

SEQ ID NO: 2547 - protein, 11 aa, Artificial Sequence
  Artificially Synthesized Peptide
DMGDLVDAEEY

SEQ ID NO: 2548 - protein, 8 aa, Artificial Sequence
  Artificially Synthesized Peptide
DMKLRLPA

SEQ ID NO: 2549 - protein, 8 aa, Artificial Sequence
  Artificially Synthesized Peptide
DSECRPRF

SEQ ID NO: 2550 - protein, 9 aa, Artificial Sequence
  Artificially Synthesized Peptide
DSECRPRFR

SEQ ID NO: 2551 - protein, 9 aa, Artificial Sequence
  Artificially Synthesized Peptide
DSLPDLSVF

SEQ ID NO: 2552 - protein, 9 aa, Artificial Sequence
  Artificially Synthesized Peptide
DTILWKDIF

SEQ ID NO: 2553 - protein, 10 aa, Artificial Sequence
  Artificially Synthesized Peptide
DTILWKDIFH

SEQ ID NO: 2554 - protein, 11 aa, Artificial Sequence
  Artificially Synthesized Peptide
DTILWKDIFHK

SEQ ID NO: 2555 - protein, 9 aa, Artificial Sequence
  Artificially Synthesized Peptide
DTNRSRACH

SEQ ID NO: 2556 - protein, 8 aa, Artificial Sequence
  Artificially Synthesized Peptide
DVFAFGGA

SEQ ID NO: 2557 - protein, 11 aa, Artificial Sequence
  Artificially Synthesized Peptide
DVFDGDLGMGA

SEQ ID NO: 2558 - protein, 10 aa, Artificial Sequence
  Artificially Synthesized Peptide
DVRLVHRDLA

SEQ ID NO: 2559 - protein, 11 aa, Artificial Sequence
  Artificially Synthesized Peptide
DVRLVHRDLAA

SEQ ID NO: 2560 - protein, 10 aa, Artificial Sequence
  Artificially Synthesized Peptide
DVRPQPPSPR

SEQ ID NO: 2561 - protein, 8 aa, Artificial Sequence
  Artificially Synthesized Peptide
DVYMIMVK

SEQ ID NO: 2562 - protein, 9 aa, Artificial Sequence
  Artificially Synthesized Peptide
EADQCVACA

SEQ ID NO: 2563 - protein, 10 aa, Artificial Sequence
  Artificially Synthesized Peptide
EADQCVACAH

SEQ ID NO: 2564 - protein, 11 aa, Artificial Sequence
  Artificially Synthesized Peptide
EADQCVACAHY

SEQ ID NO: 2565 - protein, 8 aa, Artificial Sequence
  Artificially Synthesized Peptide
EAPRSPLA

SEQ ID NO: 2566 - protein, 10 aa, Artificial Sequence
  Artificially Synthesized Peptide
ECRVLQGLPR

SEQ ID NO: 2567 - protein, 8 aa, Artificial Sequence
  Artificially Synthesized Peptide
ECVGEGLA

SEQ ID NO: 2568 - protein, 10 aa, Artificial Sequence
  Artificially Synthesized Peptide
ECVGEGLACH

SEQ ID NO: 2569 - protein, 8 aa, Artificial Sequence
  Artificially Synthesized Peptide
EDCQSLTR

SEQ ID NO: 2570 - protein, 11 aa, Artificial Sequence
  Artificially Synthesized Peptide
EDDDMGDLVDA

SEQ ID NO: 2571 - protein, 10 aa, Artificial Sequence
  Artificially Synthesized Peptide
EDECVGEGLA

SEQ ID NO: 2572 - protein, 9 aa, Artificial Sequence
  Artificially Synthesized Peptide
EDGTQRCEK

SEQ ID NO: 2573 - protein, 8 aa, Artificial Sequence
  Artificially Synthesized Peptide
EDVRLVHR

SEQ ID NO: 2574 - protein, 11 aa, Artificial Sequence
  Artificially Synthesized Peptide
EDVRLVHRDLA

SEQ ID NO: 2575 - protein, 9 aa, Artificial Sequence
  Artificially Synthesized Peptide
EFAGCKKIF

SEQ ID NO: 2576 - protein, 11 aa, Artificial Sequence
  Artificially Synthesized Peptide
EFSRMARDPQR

SEQ ID NO: 2577 - protein, 8 aa, Artificial Sequence
  Artificially Synthesized Peptide
EGAGSDVF

SEQ ID NO: 2578 - protein, 10 aa, Artificial Sequence
  Artificially Synthesized Peptide
EGLACHQLCA

SEQ ID NO: 2579 - protein, 11 aa, Artificial Sequence
  Artificially Synthesized Peptide
EGLACHQLCAR

SEQ ID NO: 2580 - protein, 8 aa, Artificial Sequence
  Artificially Synthesized Peptide
EGPLPAAR

SEQ ID NO: 2581 - protein, 10 aa, Artificial Sequence
  Artificially Synthesized Peptide
EGPLPAARPA

SEQ ID NO: 2582 - protein, 8 aa, Artificial Sequence
  Artificially Synthesized Peptide
EGRYTFGA

SEQ ID NO: 2583 - protein, 10 aa, Artificial Sequence
  Artificially Synthesized Peptide
EILDEAYVMA

SEQ ID NO: 2584 - protein, 11 aa, Artificial Sequence
  Artificially Synthesized Peptide
EILKGGVLIQR

SEQ ID NO: 2585 - protein, 8 aa, Artificial Sequence
  Artificially Synthesized Peptide
EIPDLLEK

SEQ ID NO: 2586 - protein, 11 aa, Artificial Sequence
  Artificially Synthesized Peptide
EIPDLLEKGER

SEQ ID NO: 2587 - protein, 10 aa, Artificial Sequence
  Artificially Synthesized Peptide
EITGYLYISA

SEQ ID NO: 2588 - protein, 10 aa, Artificial Sequence
  Artificially Synthesized Peptide
ELGSGLALIH

SEQ ID NO: 2589 - protein, 11 aa, Artificial Sequence
  Artificially Synthesized Peptide
ELGSGLALIHH

SEQ ID NO: 2590 - protein, 10 aa, Artificial Sequence
  Artificially Synthesized Peptide
ELHCPALVTY

SEQ ID NO: 2591 - protein, 8 aa, Artificial Sequence
  Artificially Synthesized Peptide
ELMTFGAK

SEQ ID NO: 2592 - protein, 10 aa, Artificial Sequence
  Artificially Synthesized Peptide
ELMTFGAKPY

SEQ ID NO: 2593 - protein, 9 aa, Artificial Sequence
  Artificially Synthesized Peptide
ELTYLPTNA

SEQ ID NO: 2594 - protein, 11 aa, Artificial Sequence
  Artificially Synthesized Peptide
ELVEPLTPSGA

SEQ ID NO: 2595 - protein, 8 aa, Artificial Sequence
  Artificially Synthesized Peptide
ELVSEFSR

SEQ ID NO: 2596 - protein, 10 aa, Artificial Sequence
  Artificially Synthesized Peptide
ELVSEFSRMA

SEQ ID NO: 2597 - protein, 11 aa, Artificial Sequence
  Artificially Synthesized Peptide
ELVSEFSRMAR

SEQ ID NO: 2598 - protein, 8 aa, Artificial Sequence
  Artificially Synthesized Peptide
ESFDGDPA

SEQ ID NO: 2599 - protein, 8 aa, Artificial Sequence
  Artificially Synthesized Peptide
ESILRRRF

SEQ ID NO: 2600 - protein, 10 aa, Artificial Sequence
  Artificially Synthesized Peptide
ESILRRRFTH

SEQ ID NO: 2601 - protein, 9 aa, Artificial Sequence
  Artificially Synthesized Peptide
ESMPNPEGR

SEQ ID NO: 2602 - protein, 10 aa, Artificial Sequence
  Artificially Synthesized Peptide
ESMPNPEGRY

SEQ ID NO: 2603 - protein, 11 aa, Artificial Sequence
  Artificially Synthesized Peptide
ESSEDCQSLTR

SEQ ID NO: 2604 - protein, 8 aa, Artificial Sequence
  Artificially Synthesized Peptide
ETELRKVK

SEQ ID NO: 2605 - protein, 10 aa, Artificial Sequence
  Artificially Synthesized Peptide
ETEYHADGGK

SEQ ID NO: 2606 - protein, 8 aa, Artificial Sequence
  Artificially Synthesized Peptide
ETHLDMLR

SEQ ID NO: 2607 - protein, 9 aa, Artificial Sequence
  Artificially Synthesized Peptide
ETHLDMLRH

SEQ ID NO: 2608 - protein, 11 aa, Artificial Sequence
  Artificially Synthesized Peptide
ETHLDMLRHLY

SEQ ID NO: 2609 - protein, 9 aa, Artificial Sequence
  Artificially Synthesized Peptide
ETLEEITGY

SEQ ID NO: 2610 - protein, 11 aa, Artificial Sequence
  Artificially Synthesized Peptide
ETLEEITGYLY

SEQ ID NO: 2611 - protein, 9 aa, Artificial Sequence
  Artificially Synthesized Peptide
EVQGYVLIA

SEQ ID NO: 2612 - protein, 10 aa, Artificial Sequence
  Artificially Synthesized Peptide
EVQGYVLIAH

SEQ ID NO: 2613 - protein, 8 aa, Artificial Sequence
  Artificially Synthesized Peptide
EVRAVTSA

SEQ ID NO: 2614 - protein, 10 aa, Artificial Sequence
  Artificially Synthesized Peptide
EVTAEDGTQR

SEQ ID NO: 2615 - protein, 8 aa, Artificial Sequence
  Artificially Synthesized Peptide
FAGCKKIF

SEQ ID NO: 2616 - protein, 9 aa, Artificial Sequence
  Artificially Synthesized Peptide
FCPDPAPGA

SEQ ID NO: 2617 - protein, 11 aa, Artificial Sequence
  Artificially Synthesized Peptide
FCVARCPSGVK

SEQ ID NO: 2618 - protein, 9 aa, Artificial Sequence
  Artificially Synthesized Peptide
FDGDLGMGA

SEQ ID NO: 2619 - protein, 10 aa, Artificial Sequence
  Artificially Synthesized Peptide
FDGDLGMGAA

SEQ ID NO: 2620 - protein, 11 aa, Artificial Sequence
  Artificially Synthesized Peptide
FDGDLGMGAAK

SEQ ID NO: 2621 - protein, 10 aa, Artificial Sequence
  Artificially Synthesized Peptide
FDGDPASNTA

SEQ ID NO: 2622 - protein, 10 aa, Artificial Sequence
  Artificially Synthesized Peptide
FFCPDPAPGA

SEQ ID NO: 2623 - protein, 11 aa, Artificial Sequence
  Artificially Synthesized Peptide
FGAKPYDGIPA

SEQ ID NO: 2624 - protein, 8 aa, Artificial Sequence
  Artificially Synthesized Peptide
FGASCVTA

SEQ ID NO: 2625 - protein, 11 aa, Artificial Sequence
  Artificially Synthesized Peptide
FGASCVTACPY

SEQ ID NO: 2626 - protein, 10 aa, Artificial Sequence
  Artificially Synthesized Peptide
FGGAVENPEY

SEQ ID NO: 2627 - protein, 8 aa, Artificial Sequence
  Artificially Synthesized Peptide
FGILIKRR

SEQ ID NO: 2628 - protein, 11 aa, Artificial Sequence
  Artificially Synthesized Peptide
FGILIKRRQQK

SEQ ID NO: 2629 - protein, 10 aa, Artificial Sequence
  Artificially Synthesized Peptide
FGPEADQCVA

SEQ ID NO: 2630 - protein, 11 aa, Artificial Sequence
  Artificially Synthesized Peptide
FGSLAFLPESF

SEQ ID NO: 2631 - protein, 11 aa, Artificial Sequence
  Artificially Synthesized Peptide
FLPESFDGDPA

SEQ ID NO: 2632 - protein, 11 aa, Artificial Sequence
  Artificially Synthesized Peptide
FLQDIQEVQGY

SEQ ID NO: 2633 - protein, 9 aa, Artificial Sequence
  Artificially Synthesized Peptide
FSPAFDNLY

SEQ ID NO: 2634 - protein, 10 aa, Artificial Sequence
  Artificially Synthesized Peptide
FSPAFDNLYY

SEQ ID NO: 2635 - protein, 10 aa, Artificial Sequence
  Artificially Synthesized Peptide
FSRMARDPQR

SEQ ID NO: 2636 - protein, 11 aa, Artificial Sequence
  Artificially Synthesized Peptide
FSRMARDPQRF

SEQ ID NO: 2637 - protein, 10 aa, Artificial Sequence
  Artificially Synthesized Peptide
FTHQSDVWSY

SEQ ID NO: 2638 - protein, 11 aa, Artificial Sequence
  Artificially Synthesized Peptide
FVHTVPWDQLF

SEQ ID NO: 2639 - protein, 11 aa, Artificial Sequence
  Artificially Synthesized Peptide
GAAPQPHPPPA

SEQ ID NO: 2640 - protein, 8 aa, Artificial Sequence
  Artificially Synthesized Peptide
GAFGTVYK

SEQ ID NO: 2641 - protein, 8 aa, Artificial Sequence
  Artificially Synthesized Peptide
GAGGMVHH

SEQ ID NO: 2642 - protein, 9 aa, Artificial Sequence
  Artificially Synthesized Peptide
GAGGMVHHR

SEQ ID NO: 2643 - protein, 10 aa, Artificial Sequence
  Artificially Synthesized Peptide
GAGGMVHHRH

SEQ ID NO: 2644 - protein, 11 aa, Artificial Sequence
  Artificially Synthesized Peptide
GAGGMVHHRHR

SEQ ID NO: 2645 - protein, 10 aa, Artificial Sequence
  Artificially Synthesized Peptide
GAKPYDGIPA

SEQ ID NO: 2646 - protein, 11 aa, Artificial Sequence
  Artificially Synthesized Peptide
GAKPYDGIPAR

SEQ ID NO: 2647 - protein, 10 aa, Artificial Sequence
  Artificially Synthesized Peptide
GAMPNQAQMR

SEQ ID NO: 2648 - protein, 8 aa, Artificial Sequence
  Artificially Synthesized Peptide
GAPPSTFK

SEQ ID NO: 2649 - protein, 10 aa, Artificial Sequence
  Artificially Synthesized Peptide
GASCVTACPY

SEQ ID NO: 2650 - protein, 8 aa, Artificial Sequence
  Artificially Synthesized Peptide
GASPGGLR

SEQ ID NO: 2651 - protein, 8 aa, Artificial Sequence
  Artificially Synthesized Peptide
GATLERPK

SEQ ID NO: 2652 - protein, 8 aa, Artificial Sequence
  Artificially Synthesized Peptide
GAVENPEY

SEQ ID NO: 2653 - protein, 10 aa, Artificial Sequence
  Artificially Synthesized Peptide
GCKKIFGSLA

SEQ ID NO: 2654 - protein, 11 aa, Artificial Sequence
  Artificially Synthesized Peptide
GCKKIFGSLAF

SEQ ID NO: 2655 - protein, 8 aa, Artificial Sequence
  Artificially Synthesized Peptide
GCLLDHVR

SEQ ID NO: 2656 - protein, 11 aa, Artificial Sequence
  Artificially Synthesized Peptide
GCLLDHVRENR

SEQ ID NO: 2657 - protein, 8 aa, Artificial Sequence
  Artificially Synthesized Peptide
GCPAEQRA

SEQ ID NO: 2658 - protein, 8 aa, Artificial Sequence
  Artificially Synthesized Peptide
GDLGMGAA

SEQ ID NO: 2659 - protein, 9 aa, Artificial Sequence
  Artificially Synthesized Peptide
GDLGMGAAK

SEQ ID NO: 2660 - protein, 9 aa, Artificial Sequence
  Artificially Synthesized Peptide
GDLVDAEEY

SEQ ID NO: 2661 - protein, 8 aa, Artificial Sequence
  Artificially Synthesized Peptide
GDPASNTA

SEQ ID NO: 2662 - protein, 8 aa, Artificial Sequence
  Artificially Synthesized Peptide
GFFCPDPA

SEQ ID NO: 2663 - protein, 11 aa, Artificial Sequence
  Artificially Synthesized Peptide
GFFCPDPAPGA

SEQ ID NO: 2664 - protein, 8 aa, Artificial Sequence
  Artificially Synthesized Peptide
GGAAPQPH

SEQ ID NO: 2665 - protein, 9 aa, Artificial Sequence
  Artificially Synthesized Peptide
GGAVENPEY

SEQ ID NO: 2666 - protein, 10 aa, Artificial Sequence
  Artificially Synthesized Peptide
GGKVPIKWMA

SEQ ID NO: 2667 - protein, 9 aa, Artificial Sequence
  Artificially Synthesized Peptide
GGLRELQLR

SEQ ID NO: 2668 - protein, 8 aa, Artificial Sequence
  Artificially Synthesized Peptide
GGMVHHRH

SEQ ID NO: 2669 - protein, 9 aa, Artificial Sequence
  Artificially Synthesized Peptide
GGMVHHRHR

SEQ ID NO: 2670 - protein, 9 aa, Artificial Sequence
  Artificially Synthesized Peptide
GICELHCPA

SEQ ID NO: 2671 - protein, 10 aa, Artificial Sequence
  Artificially Synthesized Peptide
GILIKRRQQK

SEQ ID NO: 2672 - protein, 8 aa, Artificial Sequence
  Artificially Synthesized Peptide
GISWLGLR

SEQ ID NO: 2673 - protein, 11 aa, Artificial Sequence
  Artificially Synthesized Peptide
GISWLGLRSLR

SEQ ID NO: 2674 - protein, 11 aa, Artificial Sequence
  Artificially Synthesized Peptide
GIWIPDGENVK

SEQ ID NO: 2675 - protein, 9 aa, Artificial Sequence
  Artificially Synthesized Peptide
GLACHQLCA

SEQ ID NO: 2676 - protein, 10 aa, Artificial Sequence
  Artificially Synthesized Peptide
GLACHQLCAR

SEQ ID NO: 2677 - protein, 10 aa, Artificial Sequence
  Artificially Synthesized Peptide
GLALIHHNTH

SEQ ID NO: 2678 - protein, 9 aa, Artificial Sequence
  Artificially Synthesized Peptide
GLEPSEEEA

SEQ ID NO: 2679 - protein, 11 aa, Artificial Sequence
  Artificially Synthesized Peptide
GLEPSEEEAPR

SEQ ID NO: 2680 - protein, 10 aa, Artificial Sequence
  Artificially Synthesized Peptide
GLGISWLGLR

SEQ ID NO: 2681 - protein, 8 aa, Artificial Sequence
  Artificially Synthesized Peptide
GLGMEHLR

SEQ ID NO: 2682 - protein, 11 aa, Artificial Sequence
  Artificially Synthesized Peptide
GLGMEHLREVR

SEQ ID NO: 2683 - protein, 11 aa, Artificial Sequence
  Artificially Synthesized Peptide
GLLLALLPPGA

SEQ ID NO: 2684 - protein, 9 aa, Artificial Sequence
  Artificially Synthesized Peptide
GLPREYVNA

SEQ ID NO: 2685 - protein, 10 aa, Artificial Sequence
  Artificially Synthesized Peptide
GLPREYVNAR

SEQ ID NO: 2686 - protein, 11 aa, Artificial Sequence
  Artificially Synthesized Peptide
GLPREYVNARH

SEQ ID NO: 2687 - protein, 8 aa, Artificial Sequence
  Artificially Synthesized Peptide
GLQSLPTH

SEQ ID NO: 2688 - protein, 8 aa, Artificial Sequence
  Artificially Synthesized Peptide
GLRELQLR

SEQ ID NO: 2689 - protein, 9 aa, Artificial Sequence
  Artificially Synthesized Peptide
GMEHLREVR

SEQ ID NO: 2690 - protein, 10 aa, Artificial Sequence
  Artificially Synthesized Peptide
GMEHLREVRA

SEQ ID NO: 2691 - protein, 9 aa, Artificial Sequence
  Artificially Synthesized Peptide
GMSYLEDVR

SEQ ID NO: 2692 - protein, 8 aa, Artificial Sequence
  Artificially Synthesized Peptide
GMVHHRHR

SEQ ID NO: 2693 - protein, 10 aa, Artificial Sequence
  Artificially Synthesized Peptide
GSCTLVCPLH

SEQ ID NO: 2694 - protein, 9 aa, Artificial Sequence
  Artificially Synthesized Peptide
GSGAFGTVY

SEQ ID NO: 2695 - protein, 10 aa, Artificial Sequence
  Artificially Synthesized Peptide
GSGAFGTVYK

SEQ ID NO: 2696 - protein, 8 aa, Artificial Sequence
  Artificially Synthesized Peptide
GSGLALIH

SEQ ID NO: 2697 - protein, 9 aa, Artificial Sequence
  Artificially Synthesized Peptide
GSGLALIHH

SEQ ID NO: 2698 - protein, 10 aa, Artificial Sequence
  Artificially Synthesized Peptide
GSLAFLPESF

SEQ ID NO: 2699 - protein, 10 aa, Artificial Sequence
  Artificially Synthesized Peptide
GSVTCFGPEA

SEQ ID NO: 2700 - protein, 10 aa, Artificial Sequence
  Artificially Synthesized Peptide
GTDMKLRLPA

SEQ ID NO: 2701 - protein, 10 aa, Artificial Sequence
  Artificially Synthesized Peptide
GTPTAENPEY

SEQ ID NO: 2702 - protein, 9 aa, Artificial Sequence
  Artificially Synthesized Peptide
GTQLFEDNY

SEQ ID NO: 2703 - protein, 10 aa, Artificial Sequence
  Artificially Synthesized Peptide
GTQLFEDNYA

SEQ ID NO: 2704 - protein, 10 aa, Artificial Sequence
  Artificially Synthesized Peptide
GTQRCEKCSK

SEQ ID NO: 2705 - protein, 9 aa, Artificial Sequence
  Artificially Synthesized Peptide
GVGSPYVSR

SEQ ID NO: 2706 - protein, 8 aa, Artificial Sequence
  Artificially Synthesized Peptide
GVKPDLSY

SEQ ID NO: 2707 - protein, 10 aa, Artificial Sequence
  Artificially Synthesized Peptide
GVTVWELMTF

SEQ ID NO: 2708 - protein, 9 aa, Artificial Sequence
  Artificially Synthesized Peptide
GVVFGILIK

SEQ ID NO: 2709 - protein, 10 aa, Artificial Sequence
  Artificially Synthesized Peptide
GVVFGILIKR

SEQ ID NO: 2710 - protein, 11 aa, Artificial Sequence
  Artificially Synthesized Peptide
GVVFGILIKRR

SEQ ID NO: 2711 - protein, 8 aa, Artificial Sequence
  Artificially Synthesized Peptide
GVVKDVFA

SEQ ID NO: 2712 - protein, 9 aa, Artificial Sequence
  Artificially Synthesized Peptide
GVVKDVFAF

SEQ ID NO: 2713 - protein, 10 aa, Artificial Sequence
  Artificially Synthesized Peptide
HADGGKVPIK

SEQ ID NO: 2714 - protein, 8 aa, Artificial Sequence
  Artificially Synthesized Peptide
HCPALVTY

SEQ ID NO: 2715 - protein, 8 aa, Artificial Sequence
  Artificially Synthesized Peptide
HDPSPLQR

SEQ ID NO: 2716 - protein, 9 aa, Artificial Sequence
  Artificially Synthesized Peptide
HDPSPLQRY

SEQ ID NO: 2717 - protein, 11 aa, Artificial Sequence
  Artificially Synthesized Peptide
HFNHSGICELH

SEQ ID NO: 2718 - protein, 9 aa, Artificial Sequence
  Artificially Synthesized Peptide
HLDMLRHLY

SEQ ID NO: 2719 - protein, 11 aa, Artificial Sequence
  Artificially Synthesized Peptide
HLREVRAVTSA

SEQ ID NO: 2720 - protein, 9 aa, Artificial Sequence
  Artificially Synthesized Peptide
HSCVDLDDK

SEQ ID NO: 2721 - protein, 9 aa, Artificial Sequence
  Artificially Synthesized Peptide
HSDCLACLH

SEQ ID NO: 2722 - protein, 10 aa, Artificial Sequence
  Artificially Synthesized Peptide
HSDCLACLHF

SEQ ID NO: 2723 - protein, 8 aa, Artificial Sequence
  Artificially Synthesized Peptide
HSGICELH

SEQ ID NO: 2724 - protein, 11 aa, Artificial Sequence
  Artificially Synthesized Peptide
HSGICELHCPA

SEQ ID NO: 2725 - protein, 9 aa, Artificial Sequence
  Artificially Synthesized Peptide
HTVPWDQLF

SEQ ID NO: 2726 - protein, 10 aa, Artificial Sequence
  Artificially Synthesized Peptide
HTVPWDQLFR

SEQ ID NO: 2727 - protein, 10 aa, Artificial Sequence
  Artificially Synthesized Peptide
HVKITDFGLA

SEQ ID NO: 2728 - protein, 11 aa, Artificial Sequence
  Artificially Synthesized Peptide
HVKITDFGLAR

SEQ ID NO: 2729 - protein, 8 aa, Artificial Sequence
  Artificially Synthesized Peptide
HVRENRGR

SEQ ID NO: 2730 - protein, 8 aa, Artificial Sequence
  Artificially Synthesized Peptide
ICELHCPA

SEQ ID NO: 2731 - protein, 8 aa, Artificial Sequence
  Artificially Synthesized Peptide
IDETEYHA

SEQ ID NO: 2732 - protein, 8 aa, Artificial Sequence
  Artificially Synthesized Peptide
IDSECRPR

SEQ ID NO: 2733 - protein, 9 aa, Artificial Sequence
  Artificially Synthesized Peptide
IDSECRPRF

SEQ ID NO: 2734 - protein, 10 aa, Artificial Sequence
  Artificially Synthesized Peptide
IDSECRPRFR

SEQ ID NO: 2735 - protein, 8 aa, Artificial Sequence
  Artificially Synthesized Peptide
IDTNRSRA

SEQ ID NO: 2736 - protein, 10 aa, Artificial Sequence
  Artificially Synthesized Peptide
IDTNRSRACH

SEQ ID NO: 2737 - protein, 9 aa, Artificial Sequence
  Artificially Synthesized Peptide
IDVYMIMVK

SEQ ID NO: 2738 - protein, 9 aa, Artificial Sequence
  Artificially Synthesized Peptide
IFHKNNQLA

SEQ ID NO: 2739 - protein, 9 aa, Artificial Sequence
  Artificially Synthesized Peptide
ILDEAYVMA

SEQ ID NO: 2740 - protein, 9 aa, Artificial Sequence
  Artificially Synthesized Peptide
ILIKRRQQK

SEQ ID NO: 2741 - protein, 11 aa, Artificial Sequence
  Artificially Synthesized Peptide
ILIKRRQQKIR

SEQ ID NO: 2742 - protein, 8 aa, Artificial Sequence
  Artificially Synthesized Peptide
ILKETELR

SEQ ID NO: 2743 - protein, 9 aa, Artificial Sequence
  Artificially Synthesized Peptide
ILKETELRK

SEQ ID NO: 2744 - protein, 11 aa, Artificial Sequence
  Artificially Synthesized Peptide
ILKETELRKVK

SEQ ID NO: 2745 - protein, 10 aa, Artificial Sequence
  Artificially Synthesized Peptide
ILKGGVLIQR

SEQ ID NO: 2746 - protein, 11 aa, Artificial Sequence
  Artificially Synthesized Peptide
ILLVVVLGVVF

SEQ ID NO: 2747 - protein, 8 aa, Artificial Sequence
  Artificially Synthesized Peptide
ILRRRFTH

SEQ ID NO: 2748 - protein, 8 aa, Artificial Sequence
  Artificially Synthesized Peptide
ILWKDIFH

SEQ ID NO: 2749 - protein, 9 aa, Artificial Sequence
  Artificially Synthesized Peptide
ILWKDIFHK

SEQ ID NO: 2750 - protein, 10 aa, Artificial Sequence
  Artificially Synthesized Peptide
ISWLGLRSLR

SEQ ID NO: 2751 - protein, 8 aa, Artificial Sequence
  Artificially Synthesized Peptide
ITDFGLAR

SEQ ID NO: 2752 - protein, 9 aa, Artificial Sequence
  Artificially Synthesized Peptide
ITGYLYISA

SEQ ID NO: 2753 - protein, 8 aa, Artificial Sequence
  Artificially Synthesized Peptide
IVRGTQLF

SEQ ID NO: 2754 - protein, 10 aa, Artificial Sequence
  Artificially Synthesized Peptide
KANKEILDEA

SEQ ID NO: 2755 - protein, 11 aa, Artificial Sequence
  Artificially Synthesized Peptide
KANKEILDEAY

SEQ ID NO: 2756 - protein, 8 aa, Artificial Sequence
  Artificially Synthesized Peptide
KCSKPCAR

SEQ ID NO: 2757 - protein, 11 aa, Artificial Sequence
  Artificially Synthesized Peptide
KCSKPCARVCY

SEQ ID NO: 2758 - protein, 10 aa, Artificial Sequence
  Artificially Synthesized Peptide
KCWMIDSECR

SEQ ID NO: 2759 - protein, 11 aa, Artificial Sequence
  Artificially Synthesized Peptide
KDIFHKNNQLA

SEQ ID NO: 2760 - protein, 8 aa, Artificial Sequence
  Artificially Synthesized Peptide
KDPPFCVA

SEQ ID NO: 2761 - protein, 9 aa, Artificial Sequence
  Artificially Synthesized Peptide
KDPPFCVAR

SEQ ID NO: 2762 - protein, 9 aa, Artificial Sequence
  Artificially Synthesized Peptide
KDVFAFGGA

SEQ ID NO: 2763 - protein, 8 aa, Artificial Sequence
  Artificially Synthesized Peptide
KFPDEEGA

SEQ ID NO: 2764 - protein, 8 aa, Artificial Sequence
  Artificially Synthesized Peptide
KGCPAEQR

SEQ ID NO: 2765 - protein, 9 aa, Artificial Sequence
  Artificially Synthesized Peptide
KGCPAEQRA

SEQ ID NO: 2766 - protein, 8 aa, Artificial Sequence
  Artificially Synthesized Peptide
KGGVLIQR

SEQ ID NO: 2767 - protein, 9 aa, Artificial Sequence
  Artificially Synthesized Peptide
KGLQSLPTH

SEQ ID NO: 2768 - protein, 10 aa, Artificial Sequence
  Artificially Synthesized Peptide
KGMSYLEDVR

SEQ ID NO: 2769 - protein, 10 aa, Artificial Sequence
  Artificially Synthesized Peptide
KGPLPTDCCH

SEQ ID NO: 2770 - protein, 11 aa, Artificial Sequence
  Artificially Synthesized Peptide
KGTPTAENPEY

SEQ ID NO: 2771 - protein, 8 aa, Artificial Sequence
  Artificially Synthesized Peptide
KIFGSLAF

SEQ ID NO: 2772 - protein, 10 aa, Artificial Sequence
  Artificially Synthesized Peptide
KIPVAIKVLR

SEQ ID NO: 2773 - protein, 8 aa, Artificial Sequence
  Artificially Synthesized Peptide
KIRKYTMR

SEQ ID NO: 2774 - protein, 9 aa, Artificial Sequence
  Artificially Synthesized Peptide
KIRKYTMRR

SEQ ID NO: 2775 - protein, 8 aa, Artificial Sequence
  Artificially Synthesized Peptide
KITDFGLA

SEQ ID NO: 2776 - protein, 9 aa, Artificial Sequence
  Artificially Synthesized Peptide
KITDFGLAR

SEQ ID NO: 2777 - protein, 11 aa, Artificial Sequence
  Artificially Synthesized Peptide
KLRLPASPETH

SEQ ID NO: 2778 - protein, 11 aa, Artificial Sequence
  Artificially Synthesized Peptide
KSPNHVKITDF

SEQ ID NO: 2779 - protein, 9 aa, Artificial Sequence
  Artificially Synthesized Peptide
KVKVLGSGA

SEQ ID NO: 2780 - protein, 10 aa, Artificial Sequence
  Artificially Synthesized Peptide
KVKVLGSGAF

SEQ ID NO: 2781 - protein, 8 aa, Artificial Sequence
  Artificially Synthesized Peptide
KVLGSGAF

SEQ ID NO: 2782 - protein, 10 aa, Artificial Sequence
  Artificially Synthesized Peptide
KVLRENTSPK

SEQ ID NO: 2783 - protein, 11 aa, Artificial Sequence
  Artificially Synthesized Peptide
KVLRENTSPKA

SEQ ID NO: 2784 - protein, 8 aa, Artificial Sequence
  Artificially Synthesized Peptide
KVPIKWMA

SEQ ID NO: 2785 - protein, 9 aa, Artificial Sequence
  Artificially Synthesized Peptide
LAARNVLVK

SEQ ID NO: 2786 - protein, 8 aa, Artificial Sequence
  Artificially Synthesized Peptide
LACHQLCA

SEQ ID NO: 2787 - protein, 9 aa, Artificial Sequence
  Artificially Synthesized Peptide
LACHQLCAR

SEQ ID NO: 2788 - protein, 11 aa, Artificial Sequence
  Artificially Synthesized Peptide
LACHQLCARGH

SEQ ID NO: 2789 - protein, 8 aa, Artificial Sequence
  Artificially Synthesized Peptide
LACLHFNH

SEQ ID NO: 2790 - protein, 8 aa, Artificial Sequence
  Artificially Synthesized Peptide
LAFLPESF

SEQ ID NO: 2791 - protein, 9 aa, Artificial Sequence
  Artificially Synthesized Peptide
LALIHHNTH

SEQ ID NO: 2792 - protein, 8 aa, Artificial Sequence
  Artificially Synthesized Peptide
LALLPPGA

SEQ ID NO: 2793 - protein, 9 aa, Artificial Sequence
  Artificially Synthesized Peptide
LALLPPGAA

SEQ ID NO: 2794 - protein, 10 aa, Artificial Sequence
  Artificially Synthesized Peptide
LALTLIDTNR

SEQ ID NO: 2795 - protein, 9 aa, Artificial Sequence
  Artificially Synthesized Peptide
LCRWGLLLA

SEQ ID NO: 2796 - protein, 10 aa, Artificial Sequence
  Artificially Synthesized Peptide
LCYQDTILWK

SEQ ID NO: 2797 - protein, 8 aa, Artificial Sequence
  Artificially Synthesized Peptide
LDDKGCPA

SEQ ID NO: 2798 - protein, 11 aa, Artificial Sequence
  Artificially Synthesized Peptide
LDDKGCPAEQR

SEQ ID NO: 2799 - protein, 8 aa, Artificial Sequence
  Artificially Synthesized Peptide
LDEAYVMA

SEQ ID NO: 2800 - protein, 8 aa, Artificial Sequence
  Artificially Synthesized Peptide
LDHVRENR

SEQ ID NO: 2801 - protein, 10 aa, Artificial Sequence
  Artificially Synthesized Peptide
LDHVRENRGR

SEQ ID NO: 2802 - protein, 8 aa, Artificial Sequence
  Artificially Synthesized Peptide
LDIDETEY

SEQ ID NO: 2803 - protein, 9 aa, Artificial Sequence
  Artificially Synthesized Peptide
LDIDETEYH

SEQ ID NO: 2804 - protein, 10 aa, Artificial Sequence
  Artificially Synthesized Peptide
LDIDETEYHA

SEQ ID NO: 2805 - protein, 8 aa, Artificial Sequence
  Artificially Synthesized Peptide
LDMLRHLY

SEQ ID NO: 2806 - protein, 9 aa, Artificial Sequence
  Artificially Synthesized Peptide
LFEDNYALA

SEQ ID NO: 2807 - protein, 8 aa, Artificial Sequence
  Artificially Synthesized Peptide
LFRNPHQA

SEQ ID NO: 2808 - protein, 11 aa, Artificial Sequence
  Artificially Synthesized Peptide
LFRNPHQALLH

SEQ ID NO: 2809 - protein, 9 aa, Artificial Sequence
  Artificially Synthesized Peptide
LGISWLGLR

SEQ ID NO: 2810 - protein, 10 aa, Artificial Sequence
  Artificially Synthesized Peptide
LGLEPSEEEA

SEQ ID NO: 2811 - protein, 10 aa, Artificial Sequence
  Artificially Synthesized Peptide
LGMEHLREVR

SEQ ID NO: 2812 - protein, 11 aa, Artificial Sequence
  Artificially Synthesized Peptide
LGMEHLREVRA

SEQ ID NO: 2813 - protein, 11 aa, Artificial Sequence
  Artificially Synthesized Peptide
LGPASPLDSTF

SEQ ID NO: 2814 - protein, 10 aa, Artificial Sequence
  Artificially Synthesized Peptide
LGSGAFGTVY

SEQ ID NO: 2815 - protein, 11 aa, Artificial Sequence
  Artificially Synthesized Peptide
LGSGAFGTVYK

SEQ ID NO: 2816 - protein, 9 aa, Artificial Sequence
  Artificially Synthesized Peptide
LGSGLALIH

SEQ ID NO: 2817 - protein, 10 aa, Artificial Sequence
  Artificially Synthesized Peptide
LGSGLALIHH

SEQ ID NO: 2818 - protein, 10 aa, Artificial Sequence
  Artificially Synthesized Peptide
LGVVFGILIK

SEQ ID NO: 2819 - protein, 11 aa, Artificial Sequence
  Artificially Synthesized Peptide
LGVVFGILIKR

SEQ ID NO: 2820 - protein, 8 aa, Artificial Sequence
  Artificially Synthesized Peptide
LIAHNQVR

SEQ ID NO: 2821 - protein, 8 aa, Artificial Sequence
  Artificially Synthesized Peptide
LIDTNRSR

SEQ ID NO: 2822 - protein, 9 aa, Artificial Sequence
  Artificially Synthesized Peptide
LIDTNRSRA

SEQ ID NO: 2823 - protein, 11 aa, Artificial Sequence
  Artificially Synthesized Peptide
LIDTNRSRACH

SEQ ID NO: 2824 - protein, 10 aa, Artificial Sequence
  Artificially Synthesized Peptide
LIHHNTHLCF

SEQ ID NO: 2825 - protein, 8 aa, Artificial Sequence
  Artificially Synthesized Peptide
LIKRRQQK

SEQ ID NO: 2826 - protein, 10 aa, Artificial Sequence
  Artificially Synthesized Peptide
LIKRRQQKIR

SEQ ID NO: 2827 - protein, 11 aa, Artificial Sequence
  Artificially Synthesized Peptide
LIKRRQQKIRK

SEQ ID NO: 2828 - protein, 10 aa, Artificial Sequence
  Artificially Synthesized Peptide
LIQRNPQLCY

SEQ ID NO: 2829 - protein, 9 aa, Artificial Sequence
  Artificially Synthesized Peptide
LLALLPPGA

SEQ ID NO: 2830 - protein, 10 aa, Artificial Sequence
  Artificially Synthesized Peptide
LLALLPPGAA

SEQ ID NO: 2831 - protein, 9 aa, Artificial Sequence
  Artificially Synthesized Peptide
LLDHVRENR

SEQ ID NO: 2832 - protein, 11 aa, Artificial Sequence
  Artificially Synthesized Peptide
LLDHVRENRGR

SEQ ID NO: 2833 - protein, 9 aa, Artificial Sequence
  Artificially Synthesized Peptide
LLDIDETEY

SEQ ID NO: 2834 - protein, 10 aa, Artificial Sequence
  Artificially Synthesized Peptide
LLDIDETEYH

SEQ ID NO: 2835 - protein, 11 aa, Artificial Sequence
  Artificially Synthesized Peptide
LLDIDETEYHA

SEQ ID NO: 2836 - protein, 10 aa, Artificial Sequence
  Artificially Synthesized Peptide
LLLALLPPGA

SEQ ID NO: 2837 - protein, 11 aa, Artificial Sequence
  Artificially Synthesized Peptide
LLLALLPPGAA

SEQ ID NO: 2838 - protein, 9 aa, Artificial Sequence
  Artificially Synthesized Peptide
LLNWCMQIA

SEQ ID NO: 2839 - protein, 10 aa, Artificial Sequence
  Artificially Synthesized Peptide
LLNWCMQIAK

SEQ ID NO: 2840 - protein, 10 aa, Artificial Sequence
  Artificially Synthesized Peptide
LLVVVLGVVF

SEQ ID NO: 2841 - protein, 10 aa, Artificial Sequence
  Artificially Synthesized Peptide
LMPYGCLLDH

SEQ ID NO: 2842 - protein, 9 aa, Artificial Sequence
  Artificially Synthesized Peptide
LMTFGAKPY

SEQ ID NO: 2843 - protein, 10 aa, Artificial Sequence
  Artificially Synthesized Peptide
LSPGKNGVVK

SEQ ID NO: 2844 - protein, 11 aa, Artificial Sequence
  Artificially Synthesized Peptide
LSVFQNLQVIR

SEQ ID NO: 2845 - protein, 8 aa, Artificial Sequence
  Artificially Synthesized Peptide
LSYMPIWK

SEQ ID NO: 2846 - protein, 9 aa, Artificial Sequence
  Artificially Synthesized Peptide
LSYMPIWKF

SEQ ID NO: 2847 - protein, 9 aa, Artificial Sequence
  Artificially Synthesized Peptide
LTCSPQPEY

SEQ ID NO: 2848 - protein, 8 aa, Artificial Sequence
  Artificially Synthesized Peptide
LTLIDTNR

SEQ ID NO: 2849 - protein, 10 aa, Artificial Sequence
  Artificially Synthesized Peptide
LTLIDTNRSR

SEQ ID NO: 2850 - protein, 11 aa, Artificial Sequence
  Artificially Synthesized Peptide
LTLIDTNRSRA

SEQ ID NO: 2851 - protein, 8 aa, Artificial Sequence
  Artificially Synthesized Peptide
LTPQGGAA

SEQ ID NO: 2852 - protein, 11 aa, Artificial Sequence
  Artificially Synthesized Peptide
LTPSGAMPNQA

SEQ ID NO: 2853 - protein, 11 aa, Artificial Sequence
  Artificially Synthesized Peptide
LTRTVCAGGCA

SEQ ID NO: 2854 - protein, 8 aa, Artificial Sequence
  Artificially Synthesized Peptide
LTYLPTNA

SEQ ID NO: 2855 - protein, 10 aa, Artificial Sequence
  Artificially Synthesized Peptide
LVEPLTPSGA

SEQ ID NO: 2856 - protein, 8 aa, Artificial Sequence
  Artificially Synthesized Peptide
LVHRDLAA

SEQ ID NO: 2857 - protein, 9 aa, Artificial Sequence
  Artificially Synthesized Peptide
LVHRDLAAR

SEQ ID NO: 2858 - protein, 9 aa, Artificial Sequence
  Artificially Synthesized Peptide
LVKSPNHVK

SEQ ID NO: 2859 - protein, 8 aa, Artificial Sequence
  Artificially Synthesized Peptide
LVPQQGFF

SEQ ID NO: 2860 - protein, 9 aa, Artificial Sequence
  Artificially Synthesized Peptide
LVSEFSRMA

SEQ ID NO: 2861 - protein, 10 aa, Artificial Sequence
  Artificially Synthesized Peptide
LVSEFSRMAR

SEQ ID NO: 2862 - protein, 8 aa, Artificial Sequence
  Artificially Synthesized Peptide
LVTQLMPY

SEQ ID NO: 2863 - protein, 9 aa, Artificial Sequence
  Artificially Synthesized Peptide
LVTYNTDTF

SEQ ID NO: 2864 - protein, 9 aa, Artificial Sequence
  Artificially Synthesized Peptide
LVVVLGVVF

SEQ ID NO: 2865 - protein, 8 aa, Artificial Sequence
  Artificially Synthesized Peptide
MAGVGSPY

SEQ ID NO: 2866 - protein, 11 aa, Artificial Sequence
  Artificially Synthesized Peptide
MAGVGSPYVSR

SEQ ID NO: 2867 - protein, 8 aa, Artificial Sequence
  Artificially Synthesized Peptide
MALESILR

SEQ ID NO: 2868 - protein, 9 aa, Artificial Sequence
  Artificially Synthesized Peptide
MALESILRR

SEQ ID NO: 2869 - protein, 10 aa, Artificial Sequence
  Artificially Synthesized Peptide
MALESILRRR

SEQ ID NO: 2870 - protein, 11 aa, Artificial Sequence
  Artificially Synthesized Peptide
MALESILRRRF

SEQ ID NO: 2871 - protein, 8 aa, Artificial Sequence
  Artificially Synthesized Peptide
MARDPQRF

SEQ ID NO: 2872 - protein, 10 aa, Artificial Sequence
  Artificially Synthesized Peptide
MGDLVDAEEY

SEQ ID NO: 2873 - protein, 9 aa, Artificial Sequence
  Artificially Synthesized Peptide
MIDSECRPR

SEQ ID NO: 2874 - protein, 10 aa, Artificial Sequence
  Artificially Synthesized Peptide
MIDSECRPRF

SEQ ID NO: 2875 - protein, 11 aa, Artificial Sequence
  Artificially Synthesized Peptide
MIDSECRPRFR

SEQ ID NO: 2876 - protein, 8 aa, Artificial Sequence
  Artificially Synthesized Peptide
MSYLEDVR

SEQ ID NO: 2877 - protein, 11 aa, Artificial Sequence
  Artificially Synthesized Peptide
MSYLEDVRLVH

SEQ ID NO: 2878 - protein, 8 aa, Artificial Sequence
  Artificially Synthesized Peptide
MTFGAKPY

SEQ ID NO: 2879 - protein, 9 aa, Artificial Sequence
  Artificially Synthesized Peptide
NARHCLPCH

SEQ ID NO: 2880 - protein, 11 aa, Artificial Sequence
  Artificially Synthesized Peptide
NGSVTCFGPEA

SEQ ID NO: 2881 - protein, 8 aa, Artificial Sequence
  Artificially Synthesized Peptide
NGVVKDVF

SEQ ID NO: 2882 - protein, 9 aa, Artificial Sequence
  Artificially Synthesized Peptide
NGVVKDVFA

SEQ ID NO: 2883 - protein, 10 aa, Artificial Sequence
  Artificially Synthesized Peptide
NGVVKDVFAF

SEQ ID NO: 2884 - protein, 9 aa, Artificial Sequence
  Artificially Synthesized Peptide
NIQEFAGCK

SEQ ID NO: 2885 - protein, 10 aa, Artificial Sequence
  Artificially Synthesized Peptide
NIQEFAGCKK

SEQ ID NO: 2886 - protein, 11 aa, Artificial Sequence
  Artificially Synthesized Peptide
NLELTYLPTNA

SEQ ID NO: 2887 - protein, 8 aa, Artificial Sequence
  Artificially Synthesized Peptide
NLQVIRGR

SEQ ID NO: 2888 - protein, 11 aa, Artificial Sequence
  Artificially Synthesized Peptide
NLQVIRGRILH

SEQ ID NO: 2889 - protein, 8 aa, Artificial Sequence
  Artificially Synthesized Peptide
NTHLCFVH

SEQ ID NO: 2890 - protein, 8 aa, Artificial Sequence
  Artificially Synthesized Peptide
NTSPKANK

SEQ ID NO: 2891 - protein, 8 aa, Artificial Sequence
  Artificially Synthesized Peptide
NTTPVTGA

SEQ ID NO: 2892 - protein, 9 aa, Artificial Sequence
  Artificially Synthesized Peptide
NVKIPVAIK

SEQ ID NO: 2893 - protein, 9 aa, Artificial Sequence
  Artificially Synthesized Peptide
NVLVKSPNH

SEQ ID NO: 2894 - protein, 11 aa, Artificial Sequence
  Artificially Synthesized Peptide
NVLVKSPNHVK

SEQ ID NO: 2895 - protein, 8 aa, Artificial Sequence
  Artificially Synthesized Peptide
PAARPAGA

SEQ ID NO: 2896 - protein, 8 aa, Artificial Sequence
  Artificially Synthesized Peptide
PAFDNLYY

SEQ ID NO: 2897 - protein, 11 aa, Artificial Sequence
  Artificially Synthesized Peptide
PAFSPAFDNLY

SEQ ID NO: 2898 - protein, 8 aa, Artificial Sequence
  Artificially Synthesized Peptide
PAGATLER

SEQ ID NO: 2899 - protein, 10 aa, Artificial Sequence
  Artificially Synthesized Peptide
PAGATLERPK

SEQ ID NO: 2900 - protein, 11 aa, Artificial Sequence
  Artificially Synthesized Peptide
PALVTYNTDTF

SEQ ID NO: 2901 - protein, 10 aa, Artificial Sequence
  Artificially Synthesized Peptide
PAPGAGGMVH

SEQ ID NO: 2902 - protein, 11 aa, Artificial Sequence
  Artificially Synthesized Peptide
PAPGAGGMVHH

SEQ ID NO: 2903 - protein, 11 aa, Artificial Sequence
  Artificially Synthesized Peptide
PAREIPDLLEK

SEQ ID NO: 2904 - protein, 9 aa, Artificial Sequence
  Artificially Synthesized Peptide
PASPLDSTF

SEQ ID NO: 2905 - protein, 10 aa, Artificial Sequence
  Artificially Synthesized Peptide
PASPLDSTFY

SEQ ID NO: 2906 - protein, 11 aa, Artificial Sequence
  Artificially Synthesized Peptide
PASPLDSTFYR

SEQ ID NO: 2907 - protein, 8 aa, Artificial Sequence
  Artificially Synthesized Peptide
PCPINCTH

SEQ ID NO: 2908 - protein, 10 aa, Artificial Sequence
  Artificially Synthesized Peptide
PCSPMCKGSR

SEQ ID NO: 2909 - protein, 11 aa, Artificial Sequence
  Artificially Synthesized Peptide
PDGENVKIPVA

SEQ ID NO: 2910 - protein, 9 aa, Artificial Sequence
  Artificially Synthesized Peptide
PDLLEKGER

SEQ ID NO: 2911 - protein, 10 aa, Artificial Sequence
  Artificially Synthesized Peptide
PDLSYMPIWK

SEQ ID NO: 2912 - protein, 11 aa, Artificial Sequence
  Artificially Synthesized Peptide
PDLSYMPIWKF

SEQ ID NO: 2913 - protein, 10 aa, Artificial Sequence
  Artificially Synthesized Peptide
PDSLPDLSVF

SEQ ID NO: 2914 - protein, 11 aa, Artificial Sequence
  Artificially Synthesized Peptide
PDVRPQPPSPR

SEQ ID NO: 2915 - protein, 8 aa, Artificial Sequence
  Artificially Synthesized Peptide
PGAGGMVH

SEQ ID NO: 2916 - protein, 9 aa, Artificial Sequence
  Artificially Synthesized Peptide
PGAGGMVHH

SEQ ID NO: 2917 - protein, 10 aa, Artificial Sequence
  Artificially Synthesized Peptide
PGAGGMVHHR

SEQ ID NO: 2918 - protein, 11 aa, Artificial Sequence
  Artificially Synthesized Peptide
PGAGGMVHHRH

SEQ ID NO: 2919 - protein, 10 aa, Artificial Sequence
  Artificially Synthesized Peptide
PGGLRELQLR

SEQ ID NO: 2920 - protein, 8 aa, Artificial Sequence
  Artificially Synthesized Peptide
PGKNGVVK

SEQ ID NO: 2921 - protein, 11 aa, Artificial Sequence
  Artificially Synthesized Peptide
PGKNGVVKDVF

SEQ ID NO: 2922 - protein, 8 aa, Artificial Sequence
  Artificially Synthesized Peptide
PICTIDVY

SEQ ID NO: 2923 - protein, 11 aa, Artificial Sequence
  Artificially Synthesized Peptide
PIWKFPDEEGA

SEQ ID NO: 2924 - protein, 8 aa, Artificial Sequence
  Artificially Synthesized Peptide
PLAPSEGA

SEQ ID NO: 2925 - protein, 8 aa, Artificial Sequence
  Artificially Synthesized Peptide
PLDSTFYR

SEQ ID NO: 2926 - protein, 9 aa, Artificial Sequence
  Artificially Synthesized Peptide
PLHNQEVTA

SEQ ID NO: 2927 - protein, 11 aa, Artificial Sequence
  Artificially Synthesized Peptide
PLNNTTPVTGA

SEQ ID NO: 2928 - protein, 8 aa, Artificial Sequence
  Artificially Synthesized Peptide
PLPAARPA

SEQ ID NO: 2929 - protein, 10 aa, Artificial Sequence
  Artificially Synthesized Peptide
PLPAARPAGA

SEQ ID NO: 2930 - protein, 9 aa, Artificial Sequence
  Artificially Synthesized Peptide
PLPSETDGY

SEQ ID NO: 2931 - protein, 11 aa, Artificial Sequence
  Artificially Synthesized Peptide
PLPSETDGYVA

SEQ ID NO: 2932 - protein, 8 aa, Artificial Sequence
  Artificially Synthesized Peptide
PLPTDCCH

SEQ ID NO: 2933 - protein, 10 aa, Artificial Sequence
  Artificially Synthesized Peptide
PLQPEQLQVF

SEQ ID NO: 2934 - protein, 9 aa, Artificial Sequence
  Artificially Synthesized Peptide
PLQRLRIVR

SEQ ID NO: 2935 - protein, 10 aa, Artificial Sequence
  Artificially Synthesized Peptide
PLTCSPQPEY

SEQ ID NO: 2936 - protein, 8 aa, Artificial Sequence
  Artificially Synthesized Peptide
PLTSIISA

SEQ ID NO: 2937 - protein, 8 aa, Artificial Sequence
  Artificially Synthesized Peptide
PSEEEAPR

SEQ ID NO: 2938 - protein, 10 aa, Artificial Sequence
  Artificially Synthesized Peptide
PSEGAGSDVF

SEQ ID NO: 2939 - protein, 9 aa, Artificial Sequence
  Artificially Synthesized Peptide
PSETDGYVA

SEQ ID NO: 2940 - protein, 9 aa, Artificial Sequence
  Artificially Synthesized Peptide
PSGAMPNQA

SEQ ID NO: 2941 - protein, 10 aa, Artificial Sequence
  Artificially Synthesized Peptide
PSGVKPDLSY

SEQ ID NO: 2942 - protein, 10 aa, Artificial Sequence
  Artificially Synthesized Peptide
PSPREGPLPA

SEQ ID NO: 2943 - protein, 11 aa, Artificial Sequence
  Artificially Synthesized Peptide
PSPREGPLPAA

SEQ ID NO: 2944 - protein, 10 aa, Artificial Sequence
  Artificially Synthesized Peptide
PSTFKGTPTA

SEQ ID NO: 2945 - protein, 8 aa, Artificial Sequence
  Artificially Synthesized Peptide
PTAENPEY

SEQ ID NO: 2946 - protein, 10 aa, Artificial Sequence
  Artificially Synthesized Peptide
PTDCCHEQCA

SEQ ID NO: 2947 - protein, 11 aa, Artificial Sequence
  Artificially Synthesized Peptide
PTDCCHEQCAA

SEQ ID NO: 2948 - protein, 10 aa, Artificial Sequence
  Artificially Synthesized Peptide
PTHDPSPLQR

SEQ ID NO: 2949 - protein, 11 aa, Artificial Sequence
  Artificially Synthesized Peptide
PTHDPSPLQRY

SEQ ID NO: 2950 - protein, 8 aa, Artificial Sequence
  Artificially Synthesized Peptide
PTNASLSF

SEQ ID NO: 2951 - protein, 10 aa, Artificial Sequence
  Artificially Synthesized Peptide
PTQCVNCSQF

SEQ ID NO: 2952 - protein, 8 aa, Artificial Sequence
  Artificially Synthesized Peptide
PVAIKVLR

SEQ ID NO: 2953 - protein, 11 aa, Artificial Sequence
  Artificially Synthesized Peptide
PVTGASPGGLR

SEQ ID NO: 2954 - protein, 9 aa, Artificial Sequence
  Artificially Synthesized Peptide
QALLHTANR

SEQ ID NO: 2955 - protein, 8 aa, Artificial Sequence
  Artificially Synthesized Peptide
QAQMRILK

SEQ ID NO: 2956 - protein, 10 aa, Artificial Sequence
  Artificially Synthesized Peptide
QCAAGCTGPK

SEQ ID NO: 2957 - protein, 11 aa, Artificial Sequence
  Artificially Synthesized Peptide
QCAAGCTGPKH

SEQ ID NO: 2958 - protein, 8 aa, Artificial Sequence
  Artificially Synthesized Peptide
QCVACAHY

SEQ ID NO: 2959 - protein, 9 aa, Artificial Sequence
  Artificially Synthesized Peptide
QCVACAHYK

SEQ ID NO: 2960 - protein, 8 aa, Artificial Sequence
  Artificially Synthesized Peptide
QCVNCSQF

SEQ ID NO: 2961 - protein, 10 aa, Artificial Sequence
  Artificially Synthesized Peptide
QCVNCSQFLR

SEQ ID NO: 2962 - protein, 9 aa, Artificial Sequence
  Artificially Synthesized Peptide
QDIQEVQGY

SEQ ID NO: 2963 - protein, 11 aa, Artificial Sequence
  Artificially Synthesized Peptide
QDLLNWCMQIA

SEQ ID NO: 2964 - protein, 8 aa, Artificial Sequence
  Artificially Synthesized Peptide
QDPPERGA

SEQ ID NO: 2965 - protein, 10 aa, Artificial Sequence
  Artificially Synthesized Peptide
QDTILWKDIF

SEQ ID NO: 2966 - protein, 11 aa, Artificial Sequence
  Artificially Synthesized Peptide
QDTILWKDIFH

SEQ ID NO: 2967 - protein, 9 aa, Artificial Sequence
  Artificially Synthesized Peptide
QGFFCPDPA

SEQ ID NO: 2968 - protein, 9 aa, Artificial Sequence
  Artificially Synthesized Peptide
QGGAAPQPH

SEQ ID NO: 2969 - protein, 11 aa, Artificial Sequence
  Artificially Synthesized Peptide
QGLGISWLGLR

SEQ ID NO: 2970 - protein, 10 aa, Artificial Sequence
  Artificially Synthesized Peptide
QGLPREYVNA

SEQ ID NO: 2971 - protein, 11 aa, Artificial Sequence
  Artificially Synthesized Peptide
QGLPREYVNAR

SEQ ID NO: 2972 - protein, 8 aa, Artificial Sequence
  Artificially Synthesized Peptide
QGNLELTY

SEQ ID NO: 2973 - protein, 8 aa, Artificial Sequence
  Artificially Synthesized Peptide
QGYVLIAH

SEQ ID NO: 2974 - protein, 8 aa, Artificial Sequence
  Artificially Synthesized Peptide
QIAKGMSY

SEQ ID NO: 2975 - protein, 11 aa, Artificial Sequence
  Artificially Synthesized Peptide
QLALTLIDTNR

SEQ ID NO: 2976 - protein, 11 aa, Artificial Sequence
  Artificially Synthesized Peptide
QLCYQDTILWK

SEQ ID NO: 2977 - protein, 8 aa, Artificial Sequence
  Artificially Synthesized Peptide
QLFEDNYA

SEQ ID NO: 2978 - protein, 10 aa, Artificial Sequence
  Artificially Synthesized Peptide
QLFEDNYALA

SEQ ID NO: 2979 - protein, 9 aa, Artificial Sequence
  Artificially Synthesized Peptide
QLFRNPHQA

SEQ ID NO: 2980 - protein, 11 aa, Artificial Sequence
  Artificially Synthesized Peptide
QLMPYGCLLDH

SEQ ID NO: 2981 - protein, 10 aa, Artificial Sequence
  Artificially Synthesized Peptide
QLRSLTEILK

SEQ ID NO: 2982 - protein, 9 aa, Artificial Sequence
  Artificially Synthesized Peptide
QLVTQLMPY

SEQ ID NO: 2983 - protein, 11 aa, Artificial Sequence
  Artificially Synthesized Peptide
QMRILKETELR

SEQ ID NO: 2984 - protein, 9 aa, Artificial Sequence
  Artificially Synthesized Peptide
QSLTRTVCA

SEQ ID NO: 2985 - protein, 9 aa, Artificial Sequence
  Artificially Synthesized Peptide
QVCTGTDMK

SEQ ID NO: 2986 - protein, 11 aa, Artificial Sequence
  Artificially Synthesized Peptide
QVCTGTDMKLR

SEQ ID NO: 2987 - protein, 9 aa, Artificial Sequence
  Artificially Synthesized Peptide
QVIRGRILH

SEQ ID NO: 2988 - protein, 8 aa, Artificial Sequence
  Artificially Synthesized Peptide
QVPLQRLR

SEQ ID NO: 2989 - protein, 11 aa, Artificial Sequence
  Artificially Synthesized Peptide
QVPLQRLRIVR

SEQ ID NO: 2990 - protein, 9 aa, Artificial Sequence
  Artificially Synthesized Peptide
QVRQVPLQR

SEQ ID NO: 2991 - protein, 11 aa, Artificial Sequence
  Artificially Synthesized Peptide
QVRQVPLQRLR

SEQ ID NO: 2992 - protein, 11 aa, Artificial Sequence
  Artificially Synthesized Peptide
QVVQGNLELTY

SEQ ID NO: 2993 - protein, 11 aa, Artificial Sequence
  Artificially Synthesized Peptide
RACHPCSPMCK

SEQ ID NO: 2994 - protein, 11 aa, Artificial Sequence
  Artificially Synthesized Peptide
RASPLTSIISA

SEQ ID NO: 2995 - protein, 11 aa, Artificial Sequence
  Artificially Synthesized Peptide
RAVTSANIQEF

SEQ ID NO: 2996 - protein, 10 aa, Artificial Sequence
  Artificially Synthesized Peptide
RCEKCSKPCA

SEQ ID NO: 2997 - protein, 11 aa, Artificial Sequence
  Artificially Synthesized Peptide
RCEKCSKPCAR

SEQ ID NO: 2998 - protein, 11 aa, Artificial Sequence
  Artificially Synthesized Peptide
RDLAARNVLVK

SEQ ID NO: 2999 - protein, 9 aa, Artificial Sequence
  Artificially Synthesized Peptide
RFRELVSEF

SEQ ID NO: 3000 - protein, 11 aa, Artificial Sequence
  Artificially Synthesized Peptide
RFRELVSEFSR

SEQ ID NO: 3001 - protein, 11 aa, Artificial Sequence
  Artificially Synthesized Peptide
RFTHQSDVWSY

SEQ ID NO: 3002 - protein, 8 aa, Artificial Sequence
  Artificially Synthesized Peptide
RGAPPSTF

SEQ ID NO: 3003 - protein, 9 aa, Artificial Sequence
  Artificially Synthesized Peptide
RGAPPSTFK

SEQ ID NO: 3004 - protein, 10 aa, Artificial Sequence
  Artificially Synthesized Peptide
RGQECVEECR

SEQ ID NO: 3005 - protein, 9 aa, Artificial Sequence
  Artificially Synthesized Peptide
RGRILHNGA

SEQ ID NO: 3006 - protein, 10 aa, Artificial Sequence
  Artificially Synthesized Peptide
RGRILHNGAY

SEQ ID NO: 3007 - protein, 10 aa, Artificial Sequence
  Artificially Synthesized Peptide
RGTQLFEDNY

SEQ ID NO: 3008 - protein, 11 aa, Artificial Sequence
  Artificially Synthesized Peptide
RGTQLFEDNYA

SEQ ID NO: 3009 - protein, 8 aa, Artificial Sequence
  Artificially Synthesized Peptide
RILHNGAY

SEQ ID NO: 3010 - protein, 9 aa, Artificial Sequence
  Artificially Synthesized Peptide
RILKETELR

SEQ ID NO: 3011 - protein, 10 aa, Artificial Sequence
  Artificially Synthesized Peptide
RILKETELRK

SEQ ID NO: 3012 - protein, 9 aa, Artificial Sequence
  Artificially Synthesized Peptide
RIVRGTQLF

SEQ ID NO: 3013 - protein, 10 aa, Artificial Sequence
  Artificially Synthesized Peptide
RLLDIDETEY

SEQ ID NO: 3014 - protein, 11 aa, Artificial Sequence
  Artificially Synthesized Peptide
RLLDIDETEYH

SEQ ID NO: 3015 - protein, 9 aa, Artificial Sequence
  Artificially Synthesized Peptide
RLPASPETH

SEQ ID NO: 3016 - protein, 11 aa, Artificial Sequence
  Artificially Synthesized Peptide
RLRIVRGTQLF

SEQ ID NO: 3017 - protein, 8 aa, Artificial Sequence
  Artificially Synthesized Peptide
RLVHRDLA

SEQ ID NO: 3018 - protein, 9 aa, Artificial Sequence
  Artificially Synthesized Peptide
RLVHRDLAA

SEQ ID NO: 3019 - protein, 10 aa, Artificial Sequence
  Artificially Synthesized Peptide
RLVHRDLAAR

SEQ ID NO: 3020 - protein, 8 aa, Artificial Sequence
  Artificially Synthesized Peptide
RMARDPQR

SEQ ID NO: 3021 - protein, 9 aa, Artificial Sequence
  Artificially Synthesized Peptide
RMARDPQRF

SEQ ID NO: 3022 - protein, 11 aa, Artificial Sequence
  Artificially Synthesized Peptide
RSLRELGSGLA

SEQ ID NO: 3023 - protein, 8 aa, Artificial Sequence
  Artificially Synthesized Peptide
RSLTEILK

SEQ ID NO: 3024 - protein, 10 aa, Artificial Sequence
  Artificially Synthesized Peptide
RSPLAPSEGA

SEQ ID NO: 3025 - protein, 9 aa, Artificial Sequence
  Artificially Synthesized Peptide
RTVCAGGCA

SEQ ID NO: 3026 - protein, 10 aa, Artificial Sequence
  Artificially Synthesized Peptide
RTVCAGGCAR

SEQ ID NO: 3027 - protein, 10 aa, Artificial Sequence
  Artificially Synthesized Peptide
RVCYGLGMEH

SEQ ID NO: 3028 - protein, 8 aa, Artificial Sequence
  Artificially Synthesized Peptide
RVLQGLPR

SEQ ID NO: 3029 - protein, 10 aa, Artificial Sequence
  Artificially Synthesized Peptide
RVLQGLPREY

SEQ ID NO: 3030 - protein, 8 aa, Artificial Sequence
  Artificially Synthesized Peptide
SANIQEFA

SEQ ID NO: 3031 - protein, 11 aa, Artificial Sequence
  Artificially Synthesized Peptide
SANIQEFAGCK

SEQ ID NO: 3032 - protein, 9 aa, Artificial Sequence
  Artificially Synthesized Peptide
SCTLVCPLH

SEQ ID NO: 3033 - protein, 8 aa, Artificial Sequence
  Artificially Synthesized Peptide
SCVDLDDK

SEQ ID NO: 3034 - protein, 8 aa, Artificial Sequence
  Artificially Synthesized Peptide
SCVTACPY

SEQ ID NO: 3035 - protein, 10 aa, Artificial Sequence
  Artificially Synthesized Peptide
SCVTACPYNY

SEQ ID NO: 3036 - protein, 8 aa, Artificial Sequence
  Artificially Synthesized Peptide
SDCLACLH

SEQ ID NO: 3037 - protein, 9 aa, Artificial Sequence
  Artificially Synthesized Peptide
SDCLACLHF

SEQ ID NO: 3038 - protein, 11 aa, Artificial Sequence
  Artificially Synthesized Peptide
SDCLACLHFNH

SEQ ID NO: 3039 - protein, 11 aa, Artificial Sequence
  Artificially Synthesized Peptide
SFDGDPASNTA

SEQ ID NO: 3040 - protein, 8 aa, Artificial Sequence
  Artificially Synthesized Peptide
SGAFGTVY

SEQ ID NO: 3041 - protein, 9 aa, Artificial Sequence
  Artificially Synthesized Peptide
SGAFGTVYK

SEQ ID NO: 3042 - protein, 8 aa, Artificial Sequence
  Artificially Synthesized Peptide
SGAMPNQA

SEQ ID NO: 3043 - protein, 11 aa, Artificial Sequence
  Artificially Synthesized Peptide
SGAMPNQAQMR

SEQ ID NO: 3044 - protein, 10 aa, Artificial Sequence
  Artificially Synthesized Peptide
SGICELHCPA

SEQ ID NO: 3045 - protein, 8 aa, Artificial Sequence
  Artificially Synthesized Peptide
SGLALIHH

SEQ ID NO: 3046 - protein, 11 aa, Artificial Sequence
  Artificially Synthesized Peptide
SGLALIHHNTH

SEQ ID NO: 3047 - protein, 9 aa, Artificial Sequence
  Artificially Synthesized Peptide
SGVKPDLSY

SEQ ID NO: 3048 - protein, 9 aa, Artificial Sequence
  Artificially Synthesized Peptide
SILRRRFTH

SEQ ID NO: 3049 - protein, 9 aa, Artificial Sequence
  Artificially Synthesized Peptide
SLAFLPESF

SEQ ID NO: 3050 - protein, 8 aa, Artificial Sequence
  Artificially Synthesized Peptide
SLPDLSVF

SEQ ID NO: 3051 - protein, 10 aa, Artificial Sequence
  Artificially Synthesized Peptide
SLRELGSGLA

SEQ ID NO: 3052 - protein, 8 aa, Artificial Sequence
  Artificially Synthesized Peptide
SLTRTVCA

SEQ ID NO: 3053 - protein, 8 aa, Artificial Sequence
  Artificially Synthesized Peptide
SMPNPEGR

SEQ ID NO: 3054 - protein, 9 aa, Artificial Sequence
  Artificially Synthesized Peptide
SMPNPEGRY

SEQ ID NO: 3055 - protein, 11 aa, Artificial Sequence
  Artificially Synthesized Peptide
SMPNPEGRYTF

SEQ ID NO: 3056 - protein, 10 aa, Artificial Sequence
  Artificially Synthesized Peptide
SSEDCQSLTR

SEQ ID NO: 3057 - protein, 9 aa, Artificial Sequence
  Artificially Synthesized Peptide
STFKGTPTA

SEQ ID NO: 3058 - protein, 11 aa, Artificial Sequence
  Artificially Synthesized Peptide
STQVCTGTDMK

SEQ ID NO: 3059 - protein, 10 aa, Artificial Sequence
  Artificially Synthesized Peptide
SVFQNLQVIR

SEQ ID NO: 3060 - protein, 9 aa, Artificial Sequence
  Artificially Synthesized Peptide
SVTCFGPEA

SEQ ID NO: 3061 - protein, 8 aa, Artificial Sequence
  Artificially Synthesized Peptide
TAEDGTQR

SEQ ID NO: 3062 - protein, 11 aa, Artificial Sequence
  Artificially Synthesized Peptide
TAEDGTQRCEK

SEQ ID NO: 3063 - protein, 8 aa, Artificial Sequence
  Artificially Synthesized Peptide
TCSPQPEY

SEQ ID NO: 3064 - protein, 9 aa, Artificial Sequence
  Artificially Synthesized Peptide
TDCCHEQCA

SEQ ID NO: 3065 - protein, 10 aa, Artificial Sequence
  Artificially Synthesized Peptide
TDCCHEQCAA

SEQ ID NO: 3066 - protein, 9 aa, Artificial Sequence
  Artificially Synthesized Peptide
TDMKLRLPA

SEQ ID NO: 3067 - protein, 11 aa, Artificial Sequence
  Artificially Synthesized Peptide
TFESMPNPEGR

SEQ ID NO: 3068 - protein, 9 aa, Artificial Sequence
  Artificially Synthesized Peptide
TFGASCVTA

SEQ ID NO: 3069 - protein, 8 aa, Artificial Sequence
  Artificially Synthesized Peptide
TFKGTPTA

SEQ ID NO: 3070 - protein, 9 aa, Artificial Sequence
  Artificially Synthesized Peptide
TGASPGGLR

SEQ ID NO: 3071 - protein, 10 aa, Artificial Sequence
  Artificially Synthesized Peptide
TGPKHSDCLA

SEQ ID NO: 3072 - protein, 8 aa, Artificial Sequence
  Artificially Synthesized Peptide
TGTDMKLR

SEQ ID NO: 3073 - protein, 11 aa, Artificial Sequence
  Artificially Synthesized Peptide
TGTDMKLRLPA

SEQ ID NO: 3074 - protein, 8 aa, Artificial Sequence
  Artificially Synthesized Peptide
TGYLYISA

SEQ ID NO: 3075 - protein, 10 aa, Artificial Sequence
  Artificially Synthesized Peptide
TIDVYMIMVK

SEQ ID NO: 3076 - protein, 8 aa, Artificial Sequence
  Artificially Synthesized Peptide
TILWKDIF

SEQ ID NO: 3077 - protein, 9 aa, Artificial Sequence
  Artificially Synthesized Peptide
TILWKDIFH

SEQ ID NO: 3078 - protein, 10 aa, Artificial Sequence
  Artificially Synthesized Peptide
TILWKDIFHK

SEQ ID NO: 3079 - protein, 8 aa, Artificial Sequence
  Artificially Synthesized Peptide
TLEEITGY

SEQ ID NO: 3080 - protein, 10 aa, Artificial Sequence
  Artificially Synthesized Peptide
TLEEITGYLY

SEQ ID NO: 3081 - protein, 11 aa, Artificial Sequence
  Artificially Synthesized Peptide
TLGLEPSEEEA

SEQ ID NO: 3082 - protein, 9 aa, Artificial Sequence
  Artificially Synthesized Peptide
TLIDTNRSR

SEQ ID NO: 3083 - protein, 10 aa, Artificial Sequence
  Artificially Synthesized Peptide
TLIDTNRSRA

SEQ ID NO: 3084 - protein, 11 aa, Artificial Sequence
  Artificially Synthesized Peptide
TLSPGKNGVVK

SEQ ID NO: 3085 - protein, 8 aa, Artificial Sequence
  Artificially Synthesized Peptide
TSANIQEF

SEQ ID NO: 3086 - protein, 9 aa, Artificial Sequence
  Artificially Synthesized Peptide
TSANIQEFA

SEQ ID NO: 3087 - protein, 8 aa, Artificial Sequence
  Artificially Synthesized Peptide
TVCAGGCA

SEQ ID NO: 3088 - protein, 9 aa, Artificial Sequence
  Artificially Synthesized Peptide
TVCAGGCAR

SEQ ID NO: 3089 - protein, 11 aa, Artificial Sequence
  Artificially Synthesized Peptide
TVCAGGCARCK

SEQ ID NO: 3090 - protein, 11 aa, Artificial Sequence
  Artificially Synthesized Peptide
TVPLPSETDGY

SEQ ID NO: 3091 - protein, 8 aa, Artificial Sequence
  Artificially Synthesized Peptide
TVPWDQLF

SEQ ID NO: 3092 - protein, 9 aa, Artificial Sequence
  Artificially Synthesized Peptide
TVPWDQLFR

SEQ ID NO: 3093 - protein, 11 aa, Artificial Sequence
  Artificially Synthesized Peptide
TVQLVTQLMPY

SEQ ID NO: 3094 - protein, 8 aa, Artificial Sequence
  Artificially Synthesized Peptide
TVWELMTF

SEQ ID NO: 3095 - protein, 10 aa, Artificial Sequence
  Artificially Synthesized Peptide
TVWELMTFGA

SEQ ID NO: 3096 - protein, 11 aa, Artificial Sequence
  Artificially Synthesized Peptide
TVWELMTFGAK

SEQ ID NO: 3097 - protein, 11 aa, Artificial Sequence
  Artificially Synthesized Peptide
VACAHYKDPPF

SEQ ID NO: 3098 - protein, 9 aa, Artificial Sequence
  Artificially Synthesized Peptide
VARCPSGVK

SEQ ID NO: 3099 - protein, 8 aa, Artificial Sequence
  Artificially Synthesized Peptide
VCAGGCAR

SEQ ID NO: 3100 - protein, 10 aa, Artificial Sequence
  Artificially Synthesized Peptide
VCAGGCARCK

SEQ ID NO: 3101 - protein, 11 aa, Artificial Sequence
  Artificially Synthesized Peptide
VCPLHNQEVTA

SEQ ID NO: 3102 - protein, 8 aa, Artificial Sequence
  Artificially Synthesized Peptide
VCTGTDMK

SEQ ID NO: 3103 - protein, 10 aa, Artificial Sequence
  Artificially Synthesized Peptide
VCTGTDMKLR

SEQ ID NO: 3104 - protein, 9 aa, Artificial Sequence
  Artificially Synthesized Peptide
VCYGLGMEH

SEQ ID NO: 3105 - protein, 11 aa, Artificial Sequence
  Artificially Synthesized Peptide
VCYGLGMEHLR

SEQ ID NO: 3106 - protein, 10 aa, Artificial Sequence
  Artificially Synthesized Peptide
VDLDDKGCPA

SEQ ID NO: 3107 - protein, 10 aa, Artificial Sequence
  Artificially Synthesized Peptide
VFDGDLGMGA

SEQ ID NO: 3108 - protein, 11 aa, Artificial Sequence
  Artificially Synthesized Peptide
VFDGDLGMGAA

SEQ ID NO: 3109 - protein, 11 aa, Artificial Sequence
  Artificially Synthesized Peptide
VFETLEEITGY

SEQ ID NO: 3110 - protein, 8 aa, Artificial Sequence
  Artificially Synthesized Peptide
VFGILIKR

SEQ ID NO: 3111 - protein, 9 aa, Artificial Sequence
  Artificially Synthesized Peptide
VFGILIKRR

SEQ ID NO: 3112 - protein, 9 aa, Artificial Sequence
  Artificially Synthesized Peptide
VFQNLQVIR

SEQ ID NO: 3113 - protein, 11 aa, Artificial Sequence
  Artificially Synthesized Peptide
VFQNLQVIRGR

SEQ ID NO: 3114 - protein, 8 aa, Artificial Sequence
  Artificially Synthesized Peptide
VGEGLACH

SEQ ID NO: 3115 - protein, 11 aa, Artificial Sequence
  Artificially Synthesized Peptide
VGSCTLVCPLH

SEQ ID NO: 3116 - protein, 8 aa, Artificial Sequence
  Artificially Synthesized Peptide
VGSPYVSR

SEQ ID NO: 3117 - protein, 10 aa, Artificial Sequence
  Artificially Synthesized Peptide
VIQNEDLGPA

SEQ ID NO: 3118 - protein, 8 aa, Artificial Sequence
  Artificially Synthesized Peptide
VIRGRILH

SEQ ID NO: 3119 - protein, 11 aa, Artificial Sequence
  Artificially Synthesized Peptide
VIRGRILHNGA

SEQ ID NO: 3120 - protein, 11 aa, Artificial Sequence
  Artificially Synthesized Peptide
VLGSGAFGTVY

SEQ ID NO: 3121 - protein, 11 aa, Artificial Sequence
  Artificially Synthesized Peptide
VLGVVFGILIK

SEQ ID NO: 3122 - protein, 9 aa, Artificial Sequence
  Artificially Synthesized Peptide
VLIAHNQVR

SEQ ID NO: 3123 - protein, 11 aa, Artificial Sequence
  Artificially Synthesized Peptide
VLIQRNPQLCY

SEQ ID NO: 3124 - protein, 9 aa, Artificial Sequence
  Artificially Synthesized Peptide
VLQGLPREY

SEQ ID NO: 3125 - protein, 9 aa, Artificial Sequence
  Artificially Synthesized Peptide
VLRENTSPK

SEQ ID NO: 3126 - protein, 10 aa, Artificial Sequence
  Artificially Synthesized Peptide
VLRENTSPKA

SEQ ID NO: 3127 - protein, 8 aa, Artificial Sequence
  Artificially Synthesized Peptide
VLVKSPNH

SEQ ID NO: 3128 - protein, 10 aa, Artificial Sequence
  Artificially Synthesized Peptide
VLVKSPNHVK

SEQ ID NO: 3129 - protein, 9 aa, Artificial Sequence
  Artificially Synthesized Peptide
VMAGVGSPY

SEQ ID NO: 3130 - protein, 8 aa, Artificial Sequence
  Artificially Synthesized Peptide
VSEFSRMA

SEQ ID NO: 3131 - protein, 9 aa, Artificial Sequence
  Artificially Synthesized Peptide
VSEFSRMAR

SEQ ID NO: 3132 - protein, 8 aa, Artificial Sequence
  Artificially Synthesized Peptide
VTACPYNY

SEQ ID NO: 3133 - protein, 9 aa, Artificial Sequence
  Artificially Synthesized Peptide
VTAEDGTQR

SEQ ID NO: 3134 - protein, 8 aa, Artificial Sequence
  Artificially Synthesized Peptide
VTCFGPEA

SEQ ID NO: 3135 - protein, 10 aa, Artificial Sequence
  Artificially Synthesized Peptide
VTGASPGGLR

SEQ ID NO: 3136 - protein, 9 aa, Artificial Sequence
  Artificially Synthesized Peptide
VTSANIQEF

SEQ ID NO: 3137 - protein, 10 aa, Artificial Sequence
  Artificially Synthesized Peptide
VTSANIQEFA

SEQ ID NO: 3138 - protein, 9 aa, Artificial Sequence
  Artificially Synthesized Peptide
VTVWELMTF

SEQ ID NO: 3139 - protein, 11 aa, Artificial Sequence
  Artificially Synthesized Peptide
VTVWELMTFGA

SEQ ID NO: 3140 - protein, 8 aa, Artificial Sequence
  Artificially Synthesized Peptide
VTYNTDTF

SEQ ID NO: 3141 - protein, 8 aa, Artificial Sequence
  Artificially Synthesized Peptide
VVFGILIK

SEQ ID NO: 3142 - protein, 9 aa, Artificial Sequence
  Artificially Synthesized Peptide
VVFGILIKR

SEQ ID NO: 3143 - protein, 10 aa, Artificial Sequence
  Artificially Synthesized Peptide
VVFGILIKRR

SEQ ID NO: 3144 - protein, 11 aa, Artificial Sequence
  Artificially Synthesized Peptide
VVIQNEDLGPA

SEQ ID NO: 3145 - protein, 8 aa, Artificial Sequence
  Artificially Synthesized Peptide
VVKDVFAF

SEQ ID NO: 3146 - protein, 11 aa, Artificial Sequence
  Artificially Synthesized Peptide
VVKDVFAFGGA

SEQ ID NO: 3147 - protein, 10 aa, Artificial Sequence
  Artificially Synthesized Peptide
VVQGNLELTY

SEQ ID NO: 3148 - protein, 8 aa, Artificial Sequence
  Artificially Synthesized Peptide
VVVLGVVF

SEQ ID NO: 3149 - protein, 11 aa, Artificial Sequence
  Artificially Synthesized Peptide
WCMQIAKGMSY

SEQ ID NO: 3150 - protein, 8 aa, Artificial Sequence
  Artificially Synthesized Peptide
WDQDPPER

SEQ ID NO: 3151 - protein, 10 aa, Artificial Sequence
  Artificially Synthesized Peptide
WDQDPPERGA

SEQ ID NO: 3152 - protein, 9 aa, Artificial Sequence
  Artificially Synthesized Peptide
WDQLFRNPH

SEQ ID NO: 3153 - protein, 11 aa, Artificial Sequence
  Artificially Synthesized Peptide
WDQLFRNPHQA

SEQ ID NO: 3154 - protein, 9 aa, Artificial Sequence
  Artificially Synthesized Peptide
WIPDGENVK

SEQ ID NO: 3155 - protein, 8 aa, Artificial Sequence
  Artificially Synthesized Peptide
WLGLRSLR

SEQ ID NO: 3156 - protein, 9 aa, Artificial Sequence
  Artificially Synthesized Peptide
WMALESILR

SEQ ID NO: 3157 - protein, 10 aa, Artificial Sequence
  Artificially Synthesized Peptide
WMALESILRR

SEQ ID NO: 3158 - protein, 11 aa, Artificial Sequence
  Artificially Synthesized Peptide
WMALESILRRR

SEQ ID NO: 3159 - protein, 8 aa, Artificial Sequence
  Artificially Synthesized Peptide
WMIDSECR

SEQ ID NO: 3160 - protein, 10 aa, Artificial Sequence
  Artificially Synthesized Peptide
WMIDSECRPR

SEQ ID NO: 3161 - protein, 11 aa, Artificial Sequence
  Artificially Synthesized Peptide
WMIDSECRPRF

SEQ ID NO: 3162 - protein, 9 aa, Artificial Sequence
  Artificially Synthesized Peptide
YGCLLDHVR

SEQ ID NO: 3163 - protein, 9 aa, Artificial Sequence
  Artificially Synthesized Peptide
YGLGMEHLR

SEQ ID NO: 3164 - protein, 11 aa, Artificial Sequence
  Artificially Synthesized Peptide
YGVTVWELMTF

SEQ ID NO: 3165 - protein, 9 aa, Artificial Sequence
  Artificially Synthesized Peptide
YLEDVRLVH

SEQ ID NO: 3166 - protein, 10 aa, Artificial Sequence
  Artificially Synthesized Peptide
YLEDVRLVHR

SEQ ID NO: 3167 - protein, 10 aa, Artificial Sequence
  Artificially Synthesized Peptide
YLPTNASLSF

SEQ ID NO: 3168 - protein, 8 aa, Artificial Sequence
  Artificially Synthesized Peptide
YLTPQGGA

SEQ ID NO: 3169 - protein, 9 aa, Artificial Sequence
  Artificially Synthesized Peptide
YLTPQGGAA

SEQ ID NO: 3170 - protein, 8 aa, Artificial Sequence
  Artificially Synthesized Peptide
YLVPQQGF

SEQ ID NO: 3171 - protein, 9 aa, Artificial Sequence
  Artificially Synthesized Peptide
YLVPQQGFF

SEQ ID NO: 3172 - protein, 10 aa, Artificial Sequence
  Artificially Synthesized Peptide
YTFGASCVTA

SEQ ID NO: 3173 - protein, 10 aa, Artificial Sequence
  Artificially Synthesized Peptide
YVLIAHNQVR

SEQ ID NO: 3174 - protein, 10 aa, Artificial Sequence
  Artificially Synthesized Peptide
YVMAGVGSPY

SEQ ID NO: 3175 - protein, 11 aa, Artificial Sequence
  Artificially Synthesized Peptide
YVNARHCLPCH

SEQ ID NO: 3176 - protein, 8 aa, Artificial Sequence
  Artificially Synthesized Peptide
YVNQPDVR

SEQ ID NO: 3177 - protein, 8 aa, Artificial Sequence
  Artificially Synthesized Peptide
AAGCTGPK

SEQ ID NO: 3178 - protein, 9 aa, Artificial Sequence
  Artificially Synthesized Peptide
AAGCTGPKH

SEQ ID NO: 3179 - protein, 11 aa, Artificial Sequence
  Artificially Synthesized Peptide
AAKGLQSLPTH

SEQ ID NO: 3180 - protein, 8 aa, Artificial Sequence
  Artificially Synthesized Peptide
AARNVLVK

SEQ ID NO: 3181 - protein, 11 aa, Artificial Sequence
  Artificially Synthesized Peptide
AARPAGATLER

SEQ ID NO: 3182 - protein, 10 aa, Artificial Sequence
  Artificially Synthesized Peptide
ACHPCSPMCK

SEQ ID NO: 3183 - protein, 8 aa, Artificial Sequence
  Artificially Synthesized Peptide
ACHQLCAR

SEQ ID NO: 3184 - protein, 10 aa, Artificial Sequence
  Artificially Synthesized Peptide
ACHQLCARGH

SEQ ID NO: 3185 - protein, 11 aa, Artificial Sequence
  Artificially Synthesized Peptide
ACQPCPINCTH

SEQ ID NO: 3186 - protein, 9 aa, Artificial Sequence
  Artificially Synthesized Peptide
ADGGKVPIK

SEQ ID NO: 3187 - protein, 9 aa, Artificial Sequence
  Artificially Synthesized Peptide
ADQCVACAH

SEQ ID NO: 3188 - protein, 10 aa, Artificial Sequence
  Artificially Synthesized Peptide
ADQCVACAHY

SEQ ID NO: 3189 - protein, 11 aa, Artificial Sequence
  Artificially Synthesized Peptide
ADQCVACAHYK

SEQ ID NO: 3190 - protein, 11 aa, Artificial Sequence
  Artificially Synthesized Peptide
AFGGAVENPEY

SEQ ID NO: 3191 - protein, 10 aa, Artificial Sequence
  Artificially Synthesized Peptide
AFSPAFDNLY

SEQ ID NO: 3192 - protein, 11 aa, Artificial Sequence
  Artificially Synthesized Peptide
AFSPAFDNLYY

SEQ ID NO: 3193 - protein, 9 aa, Artificial Sequence
  Artificially Synthesized Peptide
AGATLERPK

SEQ ID NO: 3194 - protein, 8 aa, Artificial Sequence
  Artificially Synthesized Peptide
AGCTGPKH

SEQ ID NO: 3195 - protein, 8 aa, Artificial Sequence
  Artificially Synthesized Peptide
AGGCARCK

SEQ ID NO: 3196 - protein, 8 aa, Artificial Sequence
  Artificially Synthesized Peptide
AGGMVHHR

SEQ ID NO: 3197 - protein, 9 aa, Artificial Sequence
  Artificially Synthesized Peptide
AGGMVHHRH

SEQ ID NO: 3198 - protein, 10 aa, Artificial Sequence
  Artificially Synthesized Peptide
AGGMVHHRHR

SEQ ID NO: 3199 - protein, 10 aa, Artificial Sequence
  Artificially Synthesized Peptide
AGVGSPYVSR

SEQ ID NO: 3200 - protein, 8 aa, Artificial Sequence
  Artificially Synthesized Peptide
ALESILRR

SEQ ID NO: 3201 - protein, 9 aa, Artificial Sequence
  Artificially Synthesized Peptide
ALESILRRR

SEQ ID NO: 3202 - protein, 8 aa, Artificial Sequence
  Artificially Synthesized Peptide
ALIHHNTH

SEQ ID NO: 3203 - protein, 8 aa, Artificial Sequence
  Artificially Synthesized Peptide
ALLHTANR

SEQ ID NO: 3204 - protein, 9 aa, Artificial Sequence
  Artificially Synthesized Peptide
ALTLIDTNR

SEQ ID NO: 3205 - protein, 11 aa, Artificial Sequence
  Artificially Synthesized Peptide
ALTLIDTNRSR

SEQ ID NO: 3206 - protein, 9 aa, Artificial Sequence
  Artificially Synthesized Peptide
AMPNQAQMR

SEQ ID NO: 3207 - protein, 10 aa, Artificial Sequence
  Artificially Synthesized Peptide
ANIQEFAGCK

SEQ ID NO: 3208 - protein, 11 aa, Artificial Sequence
  Artificially Synthesized Peptide
ANIQEFAGCKK

SEQ ID NO: 3209 - protein, 10 aa, Artificial Sequence
  Artificially Synthesized Peptide
ANKEILDEAY

SEQ ID NO: 3210 - protein, 9 aa, Artificial Sequence
  Artificially Synthesized Peptide
ASCVTACPY

SEQ ID NO: 3211 - protein, 11 aa, Artificial Sequence
  Artificially Synthesized Peptide
ASCVTACPYNY

SEQ ID NO: 3212 - protein, 11 aa, Artificial Sequence
  Artificially Synthesized Peptide
ASPETHLDMLR

SEQ ID NO: 3213 - protein, 9 aa, Artificial Sequence
  Artificially Synthesized Peptide
ASPLDSTFY

SEQ ID NO: 3214 - protein, 10 aa, Artificial Sequence
  Artificially Synthesized Peptide
ASPLDSTFYR

SEQ ID NO: 3215 - protein, 9 aa, Artificial Sequence
  Artificially Synthesized Peptide
CAAGCTGPK

SEQ ID NO: 3216 - protein, 10 aa, Artificial Sequence
  Artificially Synthesized Peptide
CAAGCTGPKH

SEQ ID NO: 3217 - protein, 9 aa, Artificial Sequence
  Artificially Synthesized Peptide
CAGGCARCK

SEQ ID NO: 3218 - protein, 9 aa, Artificial Sequence
  Artificially Synthesized Peptide
CLACLHFNH

SEQ ID NO: 3219 - protein, 10 aa, Artificial Sequence
  Artificially Synthesized Peptide
CLLDHVRENR

SEQ ID NO: 3220 - protein, 10 aa, Artificial Sequence
  Artificially Synthesized Peptide
CMQIAKGMSY

SEQ ID NO: 3221 - protein, 10 aa, Artificial Sequence
  Artificially Synthesized Peptide
CSKPCARVCY

SEQ ID NO: 3222 - protein, 9 aa, Artificial Sequence
  Artificially Synthesized Peptide
CSPMCKGSR

SEQ ID NO: 3223 - protein, 9 aa, Artificial Sequence
  Artificially Synthesized Peptide
CTGTDMKLR

SEQ ID NO: 3224 - protein, 11 aa, Artificial Sequence
  Artificially Synthesized Peptide
CTHSCVDLDDK

SEQ ID NO: 3225 - protein, 11 aa, Artificial Sequence
  Artificially Synthesized Peptide
CTIDVYMIMVK

SEQ ID NO: 3226 - protein, 8 aa, Artificial Sequence
  Artificially Synthesized Peptide
CTLVCPLH

SEQ ID NO: 3227 - protein, 8 aa, Artificial Sequence
  Artificially Synthesized Peptide
CVACAHYK

SEQ ID NO: 3228 - protein, 10 aa, Artificial Sequence
  Artificially Synthesized Peptide
CVARCPSGVK

SEQ ID NO: 3229 - protein, 9 aa, Artificial Sequence
  Artificially Synthesized Peptide
CVGEGLACH

SEQ ID NO: 3230 - protein, 9 aa, Artificial Sequence
  Artificially Synthesized Peptide
CVNCSQFLR

SEQ ID NO: 3231 - protein, 9 aa, Artificial Sequence
  Artificially Synthesized Peptide
CVTACPYNY

SEQ ID NO: 3232 - protein, 10 aa, Artificial Sequence
  Artificially Synthesized Peptide
DCLACLHFNH

SEQ ID NO: 3233 - protein, 10 aa, Artificial Sequence
  Artificially Synthesized Peptide
DDKGCPAEQR

SEQ ID NO: 3234 - protein, 10 aa, Artificial Sequence
  Artificially Synthesized Peptide
DGDLGMGAAK

SEQ ID NO: 3235 - protein, 8 aa, Artificial Sequence
  Artificially Synthesized Peptide
DGGKVPIK

SEQ ID NO: 3236 - protein, 8 aa, Artificial Sequence
  Artificially Synthesized Peptide
DGTQRCEK

SEQ ID NO: 3237 - protein, 11 aa, Artificial Sequence
  Artificially Synthesized Peptide
DGTQRCEKCSK

SEQ ID NO: 3238 - protein, 8 aa, Artificial Sequence
  Artificially Synthesized Peptide
DIDETEYH

SEQ ID NO: 3239 - protein, 8 aa, Artificial Sequence
  Artificially Synthesized Peptide
DIQEVQGY

SEQ ID NO: 3240 - protein, 10 aa, Artificial Sequence
  Artificially Synthesized Peptide
DLAARNVLVK

SEQ ID NO: 3241 - protein, 8 aa, Artificial Sequence
  Artificially Synthesized Peptide
DLGMGAAK

SEQ ID NO: 3242 - protein, 8 aa, Artificial Sequence
  Artificially Synthesized Peptide
DLLEKGER

SEQ ID NO: 3243 - protein, 11 aa, Artificial Sequence
  Artificially Synthesized Peptide
DLLNWCMQIAK

SEQ ID NO: 3244 - protein, 9 aa, Artificial Sequence
  Artificially Synthesized Peptide
DLSYMPIWK

SEQ ID NO: 3245 - protein, 8 aa, Artificial Sequence
  Artificially Synthesized Peptide
DLVDAEEY

SEQ ID NO: 3246 - protein, 11 aa, Artificial Sequence
  Artificially Synthesized Peptide
DMGDLVDAEEY

SEQ ID NO: 3247 - protein, 9 aa, Artificial Sequence
  Artificially Synthesized Peptide
DSECRPRFR

SEQ ID NO: 3248 - protein, 10 aa, Artificial Sequence
  Artificially Synthesized Peptide
DTILWKDIFH

SEQ ID NO: 3249 - protein, 11 aa, Artificial Sequence
  Artificially Synthesized Peptide
DTILWKDIFHK

SEQ ID NO: 3250 - protein, 9 aa, Artificial Sequence
  Artificially Synthesized Peptide
DTNRSRACH

SEQ ID NO: 3251 - protein, 10 aa, Artificial Sequence
  Artificially Synthesized Peptide
DVRPQPPSPR

SEQ ID NO: 3252 - protein, 8 aa, Artificial Sequence
  Artificially Synthesized Peptide
DVYMIMVK

SEQ ID NO: 3253 - protein, 10 aa, Artificial Sequence
  Artificially Synthesized Peptide
EADQCVACAH

SEQ ID NO: 3254 - protein, 11 aa, Artificial Sequence
  Artificially Synthesized Peptide
EADQCVACAHY

SEQ ID NO: 3255 - protein, 10 aa, Artificial Sequence
  Artificially Synthesized Peptide
ECRVLQGLPR

SEQ ID NO: 3256 - protein, 10 aa, Artificial Sequence
  Artificially Synthesized Peptide
ECVGEGLACH

SEQ ID NO: 3257 - protein, 8 aa, Artificial Sequence
  Artificially Synthesized Peptide
EDCQSLTR

SEQ ID NO: 3258 - protein, 9 aa, Artificial Sequence
  Artificially Synthesized Peptide
EDGTQRCEK

SEQ ID NO: 3259 - protein, 8 aa, Artificial Sequence
  Artificially Synthesized Peptide
EDVRLVHR

SEQ ID NO: 3260 - protein, 11 aa, Artificial Sequence
  Artificially Synthesized Peptide
EFSRMARDPQR

SEQ ID NO: 3261 - protein, 11 aa, Artificial Sequence
  Artificially Synthesized Peptide
EGLACHQLCAR

SEQ ID NO: 3262 - protein, 8 aa, Artificial Sequence
  Artificially Synthesized Peptide
EGPLPAAR

SEQ ID NO: 3263 - protein, 11 aa, Artificial Sequence
  Artificially Synthesized Peptide
EILKGGVLIQR

SEQ ID NO: 3264 - protein, 8 aa, Artificial Sequence
  Artificially Synthesized Peptide
EIPDLLEK

SEQ ID NO: 3265 - protein, 11 aa, Artificial Sequence
  Artificially Synthesized Peptide
EIPDLLEKGER

SEQ ID NO: 3266 - protein, 10 aa, Artificial Sequence
  Artificially Synthesized Peptide
ELGSGLALIH

SEQ ID NO: 3267 - protein, 11 aa, Artificial Sequence
  Artificially Synthesized Peptide
ELGSGLALIHH

SEQ ID NO: 3268 - protein, 10 aa, Artificial Sequence
  Artificially Synthesized Peptide
ELHCPALVTY

SEQ ID NO: 3269 - protein, 8 aa, Artificial Sequence
  Artificially Synthesized Peptide
ELMTFGAK

SEQ ID NO: 3270 - protein, 10 aa, Artificial Sequence
  Artificially Synthesized Peptide
ELMTFGAKPY

SEQ ID NO: 3271 - protein, 8 aa, Artificial Sequence
  Artificially Synthesized Peptide
ELVSEFSR

SEQ ID NO: 3272 - protein, 11 aa, Artificial Sequence
  Artificially Synthesized Peptide
ELVSEFSRMAR

SEQ ID NO: 3273 - protein, 9 aa, Artificial Sequence
  Artificially Synthesized Peptide
ENTSPKANK

SEQ ID NO: 3274 - protein, 10 aa, Artificial Sequence
  Artificially Synthesized Peptide
ENVKIPVAIK

SEQ ID NO: 3275 - protein, 10 aa, Artificial Sequence
  Artificially Synthesized Peptide
ESILRRRFTH

SEQ ID NO: 3276 - protein, 9 aa, Artificial Sequence
  Artificially Synthesized Peptide
ESMPNPEGR

SEQ ID NO: 3277 - protein, 10 aa, Artificial Sequence
  Artificially Synthesized Peptide
ESMPNPEGRY

SEQ ID NO: 3278 - protein, 11 aa, Artificial Sequence
  Artificially Synthesized Peptide
ESSEDCQSLTR

SEQ ID NO: 3279 - protein, 8 aa, Artificial Sequence
  Artificially Synthesized Peptide
ETELRKVK

SEQ ID NO: 3280 - protein, 10 aa, Artificial Sequence
  Artificially Synthesized Peptide
ETEYHADGGK

SEQ ID NO: 3281 - protein, 8 aa, Artificial Sequence
  Artificially Synthesized Peptide
ETHLDMLR

SEQ ID NO: 3282 - protein, 9 aa, Artificial Sequence
  Artificially Synthesized Peptide
ETHLDMLRH

SEQ ID NO: 3283 - protein, 11 aa, Artificial Sequence
  Artificially Synthesized Peptide
ETHLDMLRHLY

SEQ ID NO: 3284 - protein, 9 aa, Artificial Sequence
  Artificially Synthesized Peptide
ETLEEITGY

SEQ ID NO: 3285 - protein, 11 aa, Artificial Sequence
  Artificially Synthesized Peptide
ETLEEITGYLY

SEQ ID NO: 3286 - protein, 10 aa, Artificial Sequence
  Artificially Synthesized Peptide
EVQGYVLIAH

SEQ ID NO: 3287 - protein, 10 aa, Artificial Sequence
  Artificially Synthesized Peptide
EVTAEDGTQR

SEQ ID NO: 3288 - protein, 11 aa, Artificial Sequence
  Artificially Synthesized Peptide
FCVARCPSGVK

SEQ ID NO: 3289 - protein, 11 aa, Artificial Sequence
  Artificially Synthesized Peptide
FDGDLGMGAAK

SEQ ID NO: 3290 - protein, 11 aa, Artificial Sequence
  Artificially Synthesized Peptide
FGASCVTACPY

SEQ ID NO: 3291 - protein, 10 aa, Artificial Sequence
  Artificially Synthesized Peptide
FGGAVENPEY

SEQ ID NO: 3292 - protein, 8 aa, Artificial Sequence
  Artificially Synthesized Peptide
FGILIKRR

SEQ ID NO: 3293 - protein, 11 aa, Artificial Sequence
  Artificially Synthesized Peptide
FGILIKRRQQK

SEQ ID NO: 3294 - protein, 11 aa, Artificial Sequence
  Artificially Synthesized Peptide
FLQDIQEVQGY

SEQ ID NO: 3295 - protein, 10 aa, Artificial Sequence
  Artificially Synthesized Peptide
FNHSGICELH

SEQ ID NO: 3296 - protein, 9 aa, Artificial Sequence
  Artificially Synthesized Peptide
FSPAFDNLY

SEQ ID NO: 3297 - protein, 10 aa, Artificial Sequence
  Artificially Synthesized Peptide
FSPAFDNLYY

SEQ ID NO: 3298 - protein, 10 aa, Artificial Sequence
  Artificially Synthesized Peptide
FSRMARDPQR

SEQ ID NO: 3299 - protein, 10 aa, Artificial Sequence
  Artificially Synthesized Peptide
FTHQSDVWSY

SEQ ID NO: 3300 - protein, 8 aa, Artificial Sequence
  Artificially Synthesized Peptide
GAFGTVYK

SEQ ID NO: 3301 - protein, 8 aa, Artificial Sequence
  Artificially Synthesized Peptide
GAGGMVHH

SEQ ID NO: 3302 - protein, 9 aa, Artificial Sequence
  Artificially Synthesized Peptide
GAGGMVHHR

SEQ ID NO: 3303 - protein, 10 aa, Artificial Sequence
  Artificially Synthesized Peptide
GAGGMVHHRH

SEQ ID NO: 3304 - protein, 11 aa, Artificial Sequence
  Artificially Synthesized Peptide
GAGGMVHHRHR

SEQ ID NO: 3305 - protein, 11 aa, Artificial Sequence
  Artificially Synthesized Peptide
GAKPYDGIPAR

SEQ ID NO: 3306 - protein, 10 aa, Artificial Sequence
  Artificially Synthesized Peptide
GAMPNQAQMR

SEQ ID NO: 3307 - protein, 8 aa, Artificial Sequence
  Artificially Synthesized Peptide
GAPPSTFK

SEQ ID NO: 3308 - protein, 10 aa, Artificial Sequence
  Artificially Synthesized Peptide
GASCVTACPY

SEQ ID NO: 3309 - protein, 8 aa, Artificial Sequence
  Artificially Synthesized Peptide
GASPGGLR

SEQ ID NO: 3310 - protein, 8 aa, Artificial Sequence
  Artificially Synthesized Peptide
GATLERPK

SEQ ID NO: 3311 - protein, 8 aa, Artificial Sequence
  Artificially Synthesized Peptide
GAVENPEY

SEQ ID NO: 3312 - protein, 8 aa, Artificial Sequence
  Artificially Synthesized Peptide
GCLLDHVR

SEQ ID NO: 3313 - protein, 11 aa, Artificial Sequence
  Artificially Synthesized Peptide
GCLLDHVRENR

SEQ ID NO: 3314 - protein, 9 aa, Artificial Sequence
  Artificially Synthesized Peptide
GDLGMGAAK

SEQ ID NO: 3315 - protein, 9 aa, Artificial Sequence
  Artificially Synthesized Peptide
GDLVDAEEY

SEQ ID NO: 3316 - protein, 8 aa, Artificial Sequence
  Artificially Synthesized Peptide
GGAAPQPH

SEQ ID NO: 3317 - protein, 9 aa, Artificial Sequence
  Artificially Synthesized Peptide
GGAVENPEY

SEQ ID NO: 3318 - protein, 9 aa, Artificial Sequence
  Artificially Synthesized Peptide
GGLRELQLR

SEQ ID NO: 3319 - protein, 8 aa, Artificial Sequence
  Artificially Synthesized Peptide
GGMVHHRH

SEQ ID NO: 3320 - protein, 9 aa, Artificial Sequence
  Artificially Synthesized Peptide
GGMVHHRHR

SEQ ID NO: 3321 - protein, 10 aa, Artificial Sequence
  Artificially Synthesized Peptide
GILIKRRQQK

SEQ ID NO: 3322 - protein, 8 aa, Artificial Sequence
  Artificially Synthesized Peptide
GISWLGLR

SEQ ID NO: 3323 - protein, 11 aa, Artificial Sequence
  Artificially Synthesized Peptide
GISWLGLRSLR

SEQ ID NO: 3324 - protein, 11 aa, Artificial Sequence
  Artificially Synthesized Peptide
GIWIPDGENVK

SEQ ID NO: 3325 - protein, 10 aa, Artificial Sequence
  Artificially Synthesized Peptide
GLACHQLCAR

SEQ ID NO: 3326 - protein, 10 aa, Artificial Sequence
  Artificially Synthesized Peptide
GLALIHHNTH

SEQ ID NO: 3327 - protein, 11 aa, Artificial Sequence
  Artificially Synthesized Peptide
GLEPSEEEAPR

SEQ ID NO: 3328 - protein, 10 aa, Artificial Sequence
  Artificially Synthesized Peptide
GLGISWLGLR

SEQ ID NO: 3329 - protein, 8 aa, Artificial Sequence
  Artificially Synthesized Peptide
GLGMEHLR

SEQ ID NO: 3330 - protein, 11 aa, Artificial Sequence
  Artificially Synthesized Peptide
GLGMEHLREVR

SEQ ID NO: 3331 - protein, 10 aa, Artificial Sequence
  Artificially Synthesized Peptide
GLPREYVNAR

SEQ ID NO: 3332 - protein, 11 aa, Artificial Sequence
  Artificially Synthesized Peptide
GLPREYVNARH

SEQ ID NO: 3333 - protein, 8 aa, Artificial Sequence
  Artificially Synthesized Peptide
GLQSLPTH

SEQ ID NO: 3334 - protein, 8 aa, Artificial Sequence
  Artificially Synthesized Peptide
GLRELQLR

SEQ ID NO: 3335 - protein, 9 aa, Artificial Sequence
  Artificially Synthesized Peptide
GMEHLREVR

SEQ ID NO: 3336 - protein, 9 aa, Artificial Sequence
  Artificially Synthesized Peptide
GMSYLEDVR

SEQ ID NO: 3337 - protein, 8 aa, Artificial Sequence
  Artificially Synthesized Peptide
GMVHHRHR

SEQ ID NO: 3338 - protein, 10 aa, Artificial Sequence
  Artificially Synthesized Peptide
GSCTLVCPLH

SEQ ID NO: 3339 - protein, 9 aa, Artificial Sequence
  Artificially Synthesized Peptide
GSGAFGTVY

SEQ ID NO: 3340 - protein, 10 aa, Artificial Sequence
  Artificially Synthesized Peptide
GSGAFGTVYK

SEQ ID NO: 3341 - protein, 8 aa, Artificial Sequence
  Artificially Synthesized Peptide
GSGLALIH

SEQ ID NO: 3342 - protein, 9 aa, Artificial Sequence
  Artificially Synthesized Peptide
GSGLALIHH

SEQ ID NO: 3343 - protein, 10 aa, Artificial Sequence
  Artificially Synthesized Peptide
GTPTAENPEY

SEQ ID NO: 3344 - protein, 9 aa, Artificial Sequence
  Artificially Synthesized Peptide
GTQLFEDNY

SEQ ID NO: 3345 - protein, 10 aa, Artificial Sequence
  Artificially Synthesized Peptide
GTQRCEKCSK

SEQ ID NO: 3346 - protein, 9 aa, Artificial Sequence
  Artificially Synthesized Peptide
GVGSPYVSR

SEQ ID NO: 3347 - protein, 8 aa, Artificial Sequence
  Artificially Synthesized Peptide
GVKPDLSY

SEQ ID NO: 3348 - protein, 9 aa, Artificial Sequence
  Artificially Synthesized Peptide
GVVFGILIK

SEQ ID NO: 3349 - protein, 10 aa, Artificial Sequence
  Artificially Synthesized Peptide
GVVFGILIKR

SEQ ID NO: 3350 - protein, 11 aa, Artificial Sequence
  Artificially Synthesized Peptide
GVVFGILIKRR

SEQ ID NO: 3351 - protein, 10 aa, Artificial Sequence
  Artificially Synthesized Peptide
HADGGKVPIK

SEQ ID NO: 3352 - protein, 8 aa, Artificial Sequence
  Artificially Synthesized Peptide
HCPALVTY

SEQ ID NO: 3353 - protein, 8 aa, Artificial Sequence
  Artificially Synthesized Peptide
HDPSPLQR

SEQ ID NO: 3354 - protein, 9 aa, Artificial Sequence
  Artificially Synthesized Peptide
HDPSPLQRY

SEQ ID NO: 3355 - protein, 11 aa, Artificial Sequence
  Artificially Synthesized Peptide
HFNHSGICELH

SEQ ID NO: 3356 - protein, 9 aa, Artificial Sequence
  Artificially Synthesized Peptide
HLDMLRHLY

SEQ ID NO: 3357 - protein, 11 aa, Artificial Sequence
  Artificially Synthesized Peptide
HNQVRQVPLQR

SEQ ID NO: 3358 - protein, 9 aa, Artificial Sequence
  Artificially Synthesized Peptide
HNTHLCFVH

SEQ ID NO: 3359 - protein, 9 aa, Artificial Sequence
  Artificially Synthesized Peptide
HSCVDLDDK

SEQ ID NO: 3360 - protein, 9 aa, Artificial Sequence
  Artificially Synthesized Peptide
HSDCLACLH

SEQ ID NO: 3361 - protein, 8 aa, Artificial Sequence
  Artificially Synthesized Peptide
HSGICELH

SEQ ID NO: 3362 - protein, 10 aa, Artificial Sequence
  Artificially Synthesized Peptide
HTVPWDQLFR

SEQ ID NO: 3363 - protein, 11 aa, Artificial Sequence
  Artificially Synthesized Peptide
HVKITDFGLAR

SEQ ID NO: 3364 - protein, 8 aa, Artificial Sequence
  Artificially Synthesized Peptide
HVRENRGR

SEQ ID NO: 3365 - protein, 8 aa, Artificial Sequence
  Artificially Synthesized Peptide
IDSECRPR

SEQ ID NO: 3366 - protein, 10 aa, Artificial Sequence
  Artificially Synthesized Peptide
IDSECRPRFR

SEQ ID NO: 3367 - protein, 10 aa, Artificial Sequence
  Artificially Synthesized Peptide
IDTNRSRACH

SEQ ID NO: 3368 - protein, 9 aa, Artificial Sequence
  Artificially Synthesized Peptide
IDVYMIMVK

SEQ ID NO: 3369 - protein, 9 aa, Artificial Sequence
  Artificially Synthesized Peptide
ILIKRRQQK

SEQ ID NO: 3370 - protein, 11 aa, Artificial Sequence
  Artificially Synthesized Peptide
ILIKRRQQKIR

SEQ ID NO: 3371 - protein, 8 aa, Artificial Sequence
  Artificially Synthesized Peptide
ILKETELR

SEQ ID NO: 3372 - protein, 9 aa, Artificial Sequence
  Artificially Synthesized Peptide
ILKETELRK

SEQ ID NO: 3373 - protein, 11 aa, Artificial Sequence
  Artificially Synthesized Peptide
ILKETELRKVK

SEQ ID NO: 3374 - protein, 10 aa, Artificial Sequence
  Artificially Synthesized Peptide
ILKGGVLIQR

SEQ ID NO: 3375 - protein, 8 aa, Artificial Sequence
  Artificially Synthesized Peptide
ILRRRFTH

SEQ ID NO: 3376 - protein, 8 aa, Artificial Sequence
  Artificially Synthesized Peptide
ILWKDIFH

SEQ ID NO: 3377 - protein, 9 aa, Artificial Sequence
  Artificially Synthesized Peptide
ILWKDIFHK

SEQ ID NO: 3378 - protein, 10 aa, Artificial Sequence
  Artificially Synthesized Peptide
ISWLGLRSLR

SEQ ID NO: 3379 - protein, 8 aa, Artificial Sequence
  Artificially Synthesized Peptide
ITDFGLAR

SEQ ID NO: 3380 - protein, 11 aa, Artificial Sequence
  Artificially Synthesized Peptide
KANKEILDEAY

SEQ ID NO: 3381 - protein, 8 aa, Artificial Sequence
  Artificially Synthesized Peptide
KCSKPCAR

SEQ ID NO: 3382 - protein, 11 aa, Artificial Sequence
  Artificially Synthesized Peptide
KCSKPCARVCY

SEQ ID NO: 3383 - protein, 10 aa, Artificial Sequence
  Artificially Synthesized Peptide
KCWMIDSECR

SEQ ID NO: 3384 - protein, 9 aa, Artificial Sequence
  Artificially Synthesized Peptide
KDPPFCVAR

SEQ ID NO: 3385 - protein, 8 aa, Artificial Sequence
  Artificially Synthesized Peptide
KGCPAEQR

SEQ ID NO: 3386 - protein, 8 aa, Artificial Sequence
  Artificially Synthesized Peptide
KGGVLIQR

SEQ ID NO: 3387 - protein, 9 aa, Artificial Sequence
  Artificially Synthesized Peptide
KGLQSLPTH

SEQ ID NO: 3388 - protein, 10 aa, Artificial Sequence
  Artificially Synthesized Peptide
KGMSYLEDVR

SEQ ID NO: 3389 - protein, 10 aa, Artificial Sequence
  Artificially Synthesized Peptide
KGPLPTDCCH

SEQ ID NO: 3390 - protein, 11 aa, Artificial Sequence
  Artificially Synthesized Peptide
KGTPTAENPEY

SEQ ID NO: 3391 - protein, 10 aa, Artificial Sequence
  Artificially Synthesized Peptide
KIPVAIKVLR

SEQ ID NO: 3392 - protein, 8 aa, Artificial Sequence
  Artificially Synthesized Peptide
KIRKYTMR

SEQ ID NO: 3393 - protein, 9 aa, Artificial Sequence
  Artificially Synthesized Peptide
KIRKYTMRR

SEQ ID NO: 3394 - protein, 9 aa, Artificial Sequence
  Artificially Synthesized Peptide
KITDFGLAR

SEQ ID NO: 3395 - protein, 11 aa, Artificial Sequence
  Artificially Synthesized Peptide
KLRLPASPETH

SEQ ID NO: 3396 - protein, 10 aa, Artificial Sequence
  Artificially Synthesized Peptide
KVLRENTSPK

SEQ ID NO: 3397 - protein, 9 aa, Artificial Sequence
  Artificially Synthesized Peptide
LAARNVLVK

SEQ ID NO: 3398 - protein, 9 aa, Artificial Sequence
  Artificially Synthesized Peptide
LACHQLCAR

SEQ ID NO: 3399 - protein, 11 aa, Artificial Sequence
  Artificially Synthesized Peptide
LACHQLCARGH

SEQ ID NO: 3400 - protein, 8 aa, Artificial Sequence
  Artificially Synthesized Peptide
LACLHFNH

SEQ ID NO: 3401 - protein, 9 aa, Artificial Sequence
  Artificially Synthesized Peptide
LALIHHNTH

SEQ ID NO: 3402 - protein, 10 aa, Artificial Sequence
  Artificially Synthesized Peptide
LALTLIDTNR

SEQ ID NO: 3403 - protein, 10 aa, Artificial Sequence
  Artificially Synthesized Peptide
LCYQDTILWK

SEQ ID NO: 3404 - protein, 11 aa, Artificial Sequence
  Artificially Synthesized Peptide
LDDKGCPAEQR

SEQ ID NO: 3405 - protein, 8 aa, Artificial Sequence
  Artificially Synthesized Peptide
LDHVRENR

SEQ ID NO: 3406 - protein, 10 aa, Artificial Sequence
  Artificially Synthesized Peptide
LDHVRENRGR

SEQ ID NO: 3407 - protein, 8 aa, Artificial Sequence
  Artificially Synthesized Peptide
LDIDETEY

SEQ ID NO: 3408 - protein, 9 aa, Artificial Sequence
  Artificially Synthesized Peptide
LDIDETEYH

SEQ ID NO: 3409 - protein, 8 aa, Artificial Sequence
  Artificially Synthesized Peptide
LDMLRHLY

SEQ ID NO: 3410 - protein, 11 aa, Artificial Sequence
  Artificially Synthesized Peptide
LFRNPHQALLH

SEQ ID NO: 3411 - protein, 9 aa, Artificial Sequence
  Artificially Synthesized Peptide
LGISWLGLR

SEQ ID NO: 3412 - protein, 10 aa, Artificial Sequence
  Artificially Synthesized Peptide
LGMEHLREVR

SEQ ID NO: 3413 - protein, 10 aa, Artificial Sequence
  Artificially Synthesized Peptide
LGSGAFGTVY

SEQ ID NO: 3414 - protein, 11 aa, Artificial Sequence
  Artificially Synthesized Peptide
LGSGAFGTVYK

SEQ ID NO: 3415 - protein, 9 aa, Artificial Sequence
  Artificially Synthesized Peptide
LGSGLALIH

SEQ ID NO: 3416 - protein, 10 aa, Artificial Sequence
  Artificially Synthesized Peptide
LGSGLALIHH

SEQ ID NO: 3417 - protein, 10 aa, Artificial Sequence
  Artificially Synthesized Peptide
LGVVFGILIK

SEQ ID NO: 3418 - protein, 11 aa, Artificial Sequence
  Artificially Synthesized Peptide
LGVVFGILIKR

SEQ ID NO: 3419 - protein, 8 aa, Artificial Sequence
  Artificially Synthesized Peptide
LIAHNQVR

SEQ ID NO: 3420 - protein, 8 aa, Artificial Sequence
  Artificially Synthesized Peptide
LIDTNRSR

SEQ ID NO: 3421 - protein, 11 aa, Artificial Sequence
  Artificially Synthesized Peptide
LIDTNRSRACH

SEQ ID NO: 3422 - protein, 8 aa, Artificial Sequence
  Artificially Synthesized Peptide
LIKRRQQK

SEQ ID NO: 3423 - protein, 10 aa, Artificial Sequence
  Artificially Synthesized Peptide
LIKRRQQKIR

SEQ ID NO: 3424 - protein, 11 aa, Artificial Sequence
  Artificially Synthesized Peptide
LIKRRQQKIRK

SEQ ID NO: 3425 - protein, 10 aa, Artificial Sequence
  Artificially Synthesized Peptide
LIQRNPQLCY

SEQ ID NO: 3426 - protein, 9 aa, Artificial Sequence
  Artificially Synthesized Peptide
LLDHVRENR

SEQ ID NO: 3427 - protein, 11 aa, Artificial Sequence
  Artificially Synthesized Peptide
LLDHVRENRGR

SEQ ID NO: 3428 - protein, 9 aa, Artificial Sequence
  Artificially Synthesized Peptide
LLDIDETEY

SEQ ID NO: 3429 - protein, 10 aa, Artificial Sequence
  Artificially Synthesized Peptide
LLDIDETEYH

SEQ ID NO: 3430 - protein, 10 aa, Artificial Sequence
  Artificially Synthesized Peptide
LLNWCMQIAK

SEQ ID NO: 3431 - protein, 10 aa, Artificial Sequence
  Artificially Synthesized Peptide
LMPYGCLLDH

SEQ ID NO: 3432 - protein, 9 aa, Artificial Sequence
  Artificially Synthesized Peptide
LMTFGAKPY

SEQ ID NO: 3433 - protein, 9 aa, Artificial Sequence
  Artificially Synthesized Peptide
LNWCMQIAK

SEQ ID NO: 3434 - protein, 10 aa, Artificial Sequence
  Artificially Synthesized Peptide
LSPGKNGVVK

SEQ ID NO: 3435 - protein, 11 aa, Artificial Sequence
  Artificially Synthesized Peptide
LSVFQNLQVIR

SEQ ID NO: 3436 - protein, 8 aa, Artificial Sequence
  Artificially Synthesized Peptide
LSYMPIWK

SEQ ID NO: 3437 - protein, 9 aa, Artificial Sequence
  Artificially Synthesized Peptide
LTCSPQPEY

SEQ ID NO: 3438 - protein, 8 aa, Artificial Sequence
  Artificially Synthesized Peptide
LTLIDTNR

SEQ ID NO: 3439 - protein, 10 aa, Artificial Sequence
  Artificially Synthesized Peptide
LTLIDTNRSR

SEQ ID NO: 3440 - protein, 9 aa, Artificial Sequence
  Artificially Synthesized Peptide
LVHRDLAAR

SEQ ID NO: 3441 - protein, 9 aa, Artificial Sequence
  Artificially Synthesized Peptide
LVKSPNHVK

SEQ ID NO: 3442 - protein, 10 aa, Artificial Sequence
  Artificially Synthesized Peptide
LVSEFSRMAR

SEQ ID NO: 3443 - protein, 8 aa, Artificial Sequence
  Artificially Synthesized Peptide
LVTQLMPY

SEQ ID NO: 3444 - protein, 8 aa, Artificial Sequence
  Artificially Synthesized Peptide
MAGVGSPY

SEQ ID NO: 3445 - protein, 11 aa, Artificial Sequence
  Artificially Synthesized Peptide
MAGVGSPYVSR

SEQ ID NO: 3446 - protein, 8 aa, Artificial Sequence
  Artificially Synthesized Peptide
MALESILR

SEQ ID NO: 3447 - protein, 9 aa, Artificial Sequence
  Artificially Synthesized Peptide
MALESILRR

SEQ ID NO: 3448 - protein, 10 aa, Artificial Sequence
  Artificially Synthesized Peptide
MALESILRRR

SEQ ID NO: 3449 - protein, 10 aa, Artificial Sequence
  Artificially Synthesized Peptide
MGDLVDAEEY

SEQ ID NO: 3450 - protein, 9 aa, Artificial Sequence
  Artificially Synthesized Peptide
MIDSECRPR

SEQ ID NO: 3451 - protein, 11 aa, Artificial Sequence
  Artificially Synthesized Peptide
MIDSECRPRFR

SEQ ID NO: 3452 - protein, 8 aa, Artificial Sequence
  Artificially Synthesized Peptide
MSYLEDVR

SEQ ID NO: 3453 - protein, 11 aa, Artificial Sequence
  Artificially Synthesized Peptide
MSYLEDVRLVH

SEQ ID NO: 3454 - protein, 8 aa, Artificial Sequence
  Artificially Synthesized Peptide
MTFGAKPY

SEQ ID NO: 3455 - protein, 9 aa, Artificial Sequence
  Artificially Synthesized Peptide
NARHCLPCH

SEQ ID NO: 3456 - protein, 9 aa, Artificial Sequence
  Artificially Synthesized Peptide
NIQEFAGCK

SEQ ID NO: 3457 - protein, 10 aa, Artificial Sequence
  Artificially Synthesized Peptide
NIQEFAGCKK

SEQ ID NO: 3458 - protein, 8 aa, Artificial Sequence
  Artificially Synthesized Peptide
NLQVIRGR

SEQ ID NO: 3459 - protein, 11 aa, Artificial Sequence
  Artificially Synthesized Peptide
NLQVIRGRILH

SEQ ID NO: 3460 - protein, 8 aa, Artificial Sequence
  Artificially Synthesized Peptide
NTHLCFVH

SEQ ID NO: 3461 - protein, 8 aa, Artificial Sequence
  Artificially Synthesized Peptide
NTSPKANK

SEQ ID NO: 3462 - protein, 9 aa, Artificial Sequence
  Artificially Synthesized Peptide
NVKIPVAIK

SEQ ID NO: 3463 - protein, 9 aa, Artificial Sequence
  Artificially Synthesized Peptide
NVLVKSPNH

SEQ ID NO: 3464 - protein, 11 aa, Artificial Sequence
  Artificially Synthesized Peptide
NVLVKSPNHVK

SEQ ID NO: 3465 - protein, 8 aa, Artificial Sequence
  Artificially Synthesized Peptide
PAFDNLYY

SEQ ID NO: 3466 - protein, 11 aa, Artificial Sequence
  Artificially Synthesized Peptide
PAFSPAFDNLY

SEQ ID NO: 3467 - protein, 8 aa, Artificial Sequence
  Artificially Synthesized Peptide
PAGATLER

SEQ ID NO: 3468 - protein, 10 aa, Artificial Sequence
  Artificially Synthesized Peptide
PAGATLERPK

SEQ ID NO: 3469 - protein, 10 aa, Artificial Sequence
  Artificially Synthesized Peptide
PAPGAGGMVH

SEQ ID NO: 3470 - protein, 11 aa, Artificial Sequence
  Artificially Synthesized Peptide
PAPGAGGMVHH

SEQ ID NO: 3471 - protein, 11 aa, Artificial Sequence
  Artificially Synthesized Peptide
PAREIPDLLEK

SEQ ID NO: 3472 - protein, 10 aa, Artificial Sequence
  Artificially Synthesized Peptide
PASPLDSTFY

SEQ ID NO: 3473 - protein, 11 aa, Artificial Sequence
  Artificially Synthesized Peptide
PASPLDSTFYR

SEQ ID NO: 3474 - protein, 8 aa, Artificial Sequence
  Artificially Synthesized Peptide
PCPINCTH

SEQ ID NO: 3475 - protein, 10 aa, Artificial Sequence
  Artificially Synthesized Peptide
PCSPMCKGSR

SEQ ID NO: 3476 - protein, 9 aa, Artificial Sequence
  Artificially Synthesized Peptide
PDLLEKGER

SEQ ID NO: 3477 - protein, 10 aa, Artificial Sequence
  Artificially Synthesized Peptide
PDLSYMPIWK

SEQ ID NO: 3478 - protein, 11 aa, Artificial Sequence
  Artificially Synthesized Peptide
PDVRPQPPSPR

SEQ ID NO: 3479 - protein, 8 aa, Artificial Sequence
  Artificially Synthesized Peptide
PGAGGMVH

SEQ ID NO: 3480 - protein, 9 aa, Artificial Sequence
  Artificially Synthesized Peptide
PGAGGMVHH

SEQ ID NO: 3481 - protein, 10 aa, Artificial Sequence
  Artificially Synthesized Peptide
PGAGGMVHHR

SEQ ID NO: 3482 - protein, 11 aa, Artificial Sequence
  Artificially Synthesized Peptide
PGAGGMVHHRH

SEQ ID NO: 3483 - protein, 10 aa, Artificial Sequence
  Artificially Synthesized Peptide
PGGLRELQLR

SEQ ID NO: 3484 - protein, 8 aa, Artificial Sequence
  Artificially Synthesized Peptide
PGKNGVVK

SEQ ID NO: 3485 - protein, 8 aa, Artificial Sequence
  Artificially Synthesized Peptide
PICTIDVY

SEQ ID NO: 3486 - protein, 8 aa, Artificial Sequence
  Artificially Synthesized Peptide
PLDSTFYR

SEQ ID NO: 3487 - protein, 9 aa, Artificial Sequence
  Artificially Synthesized Peptide
PLPSETDGY

SEQ ID NO: 3488 - protein, 8 aa, Artificial Sequence
  Artificially Synthesized Peptide
PLPTDCCH

SEQ ID NO: 3489 - protein, 9 aa, Artificial Sequence
  Artificially Synthesized Peptide
PLQRLRIVR

SEQ ID NO: 3490 - protein, 10 aa, Artificial Sequence
  Artificially Synthesized Peptide
PLTCSPQPEY

SEQ ID NO: 3491 - protein, 10 aa, Artificial Sequence
  Artificially Synthesized Peptide
PNQAQMRILK

SEQ ID NO: 3492 - protein, 8 aa, Artificial Sequence
  Artificially Synthesized Peptide
PSEEEAPR

SEQ ID NO: 3493 - protein, 10 aa, Artificial Sequence
  Artificially Synthesized Peptide
PSGVKPDLSY

SEQ ID NO: 3494 - protein, 8 aa, Artificial Sequence
  Artificially Synthesized Peptide
PTAENPEY

SEQ ID NO: 3495 - protein, 10 aa, Artificial Sequence
  Artificially Synthesized Peptide
PTHDPSPLQR

SEQ ID NO: 3496 - protein, 11 aa, Artificial Sequence
  Artificially Synthesized Peptide
PTHDPSPLQRY

SEQ ID NO: 3497 - protein, 8 aa, Artificial Sequence
  Artificially Synthesized Peptide
PVAIKVLR

SEQ ID NO: 3498 - protein, 11 aa, Artificial Sequence
  Artificially Synthesized Peptide
PVTGASPGGLR

SEQ ID NO: 3499 - protein, 9 aa, Artificial Sequence
  Artificially Synthesized Peptide
QALLHTANR

SEQ ID NO: 3500 - protein, 8 aa, Artificial Sequence
  Artificially Synthesized Peptide
QAQMRILK

SEQ ID NO: 3501 - protein, 10 aa, Artificial Sequence
  Artificially Synthesized Peptide
QCAAGCTGPK

SEQ ID NO: 3502 - protein, 11 aa, Artificial Sequence
  Artificially Synthesized Peptide
QCAAGCTGPKH

SEQ ID NO: 3503 - protein, 8 aa, Artificial Sequence
  Artificially Synthesized Peptide
QCVACAHY

SEQ ID NO: 3504 - protein, 9 aa, Artificial Sequence
  Artificially Synthesized Peptide
QCVACAHYK

SEQ ID NO: 3505 - protein, 10 aa, Artificial Sequence
  Artificially Synthesized Peptide
QCVNCSQFLR

SEQ ID NO: 3506 - protein, 9 aa, Artificial Sequence
  Artificially Synthesized Peptide
QDIQEVQGY

SEQ ID NO: 3507 - protein, 11 aa, Artificial Sequence
  Artificially Synthesized Peptide
QDTILWKDIFH

SEQ ID NO: 3508 - protein, 9 aa, Artificial Sequence
  Artificially Synthesized Peptide
QGGAAPQPH

SEQ ID NO: 3509 - protein, 11 aa, Artificial Sequence
  Artificially Synthesized Peptide
QGLGISWLGLR

SEQ ID NO: 3510 - protein, 11 aa, Artificial Sequence
  Artificially Synthesized Peptide
QGLPREYVNAR

SEQ ID NO: 3511 - protein, 8 aa, Artificial Sequence
  Artificially Synthesized Peptide
QGNLELTY

SEQ ID NO: 3512 - protein, 8 aa, Artificial Sequence
  Artificially Synthesized Peptide
QGYVLIAH

SEQ ID NO: 3513 - protein, 8 aa, Artificial Sequence
  Artificially Synthesized Peptide
QIAKGMSY

SEQ ID NO: 3514 - protein, 11 aa, Artificial Sequence
  Artificially Synthesized Peptide
QLALTLIDTNR

SEQ ID NO: 3515 - protein, 11 aa, Artificial Sequence
  Artificially Synthesized Peptide
QLCYQDTILWK

SEQ ID NO: 3516 - protein, 11 aa, Artificial Sequence
  Artificially Synthesized Peptide
QLMPYGCLLDH

SEQ ID NO: 3517 - protein, 10 aa, Artificial Sequence
  Artificially Synthesized Peptide
QLRSLTEILK

SEQ ID NO: 3518 - protein, 9 aa, Artificial Sequence
  Artificially Synthesized Peptide
QLVTQLMPY

SEQ ID NO: 3519 - protein, 11 aa, Artificial Sequence
  Artificially Synthesized Peptide
QMRILKETELR

SEQ ID NO: 3520 - protein, 9 aa, Artificial Sequence
  Artificially Synthesized Peptide
QNLQVIRGR

SEQ ID NO: 3521 - protein, 9 aa, Artificial Sequence
  Artificially Synthesized Peptide
QVCTGTDMK

SEQ ID NO: 3522 - protein, 11 aa, Artificial Sequence
  Artificially Synthesized Peptide
QVCTGTDMKLR

SEQ ID NO: 3523 - protein, 9 aa, Artificial Sequence
  Artificially Synthesized Peptide
QVIRGRILH

SEQ ID NO: 3524 - protein, 8 aa, Artificial Sequence
  Artificially Synthesized Peptide
QVPLQRLR

SEQ ID NO: 3525 - protein, 11 aa, Artificial Sequence
  Artificially Synthesized Peptide
QVPLQRLRIVR

SEQ ID NO: 3526 - protein, 9 aa, Artificial Sequence
  Artificially Synthesized Peptide
QVRQVPLQR

SEQ ID NO: 3527 - protein, 11 aa, Artificial Sequence
  Artificially Synthesized Peptide
QVRQVPLQRLR

SEQ ID NO: 3528 - protein, 11 aa, Artificial Sequence
  Artificially Synthesized Peptide
QVVQGNLELTY

SEQ ID NO: 3529 - protein, 11 aa, Artificial Sequence
  Artificially Synthesized Peptide
RACHPCSPMCK

SEQ ID NO: 3530 - protein, 11 aa, Artificial Sequence
  Artificially Synthesized Peptide
RCEKCSKPCAR

SEQ ID NO: 3531 - protein, 11 aa, Artificial Sequence
  Artificially Synthesized Peptide
RDLAARNVLVK

SEQ ID NO: 3532 - protein, 11 aa, Artificial Sequence
  Artificially Synthesized Peptide
RFRELVSEFSR

SEQ ID NO: 3533 - protein, 11 aa, Artificial Sequence
  Artificially Synthesized Peptide
RFTHQSDVWSY

SEQ ID NO: 3534 - protein, 9 aa, Artificial Sequence
  Artificially Synthesized Peptide
RGAPPSTFK

SEQ ID NO: 3535 - protein, 10 aa, Artificial Sequence
  Artificially Synthesized Peptide
RGQECVEECR

SEQ ID NO: 3536 - protein, 10 aa, Artificial Sequence
  Artificially Synthesized Peptide
RGRILHNGAY

SEQ ID NO: 3537 - protein, 10 aa, Artificial Sequence
  Artificially Synthesized Peptide
RGTQLFEDNY

SEQ ID NO: 3538 - protein, 8 aa, Artificial Sequence
  Artificially Synthesized Peptide
RILHNGAY

SEQ ID NO: 3539 - protein, 9 aa, Artificial Sequence
  Artificially Synthesized Peptide
RILKETELR

SEQ ID NO: 3540 - protein, 10 aa, Artificial Sequence
  Artificially Synthesized Peptide
RILKETELRK

SEQ ID NO: 3541 - protein, 10 aa, Artificial Sequence
  Artificially Synthesized Peptide
RLLDIDETEY

SEQ ID NO: 3542 - protein, 11 aa, Artificial Sequence
  Artificially Synthesized Peptide
RLLDIDETEYH

SEQ ID NO: 3543 - protein, 9 aa, Artificial Sequence
  Artificially Synthesized Peptide
RLPASPETH

SEQ ID NO: 3544 - protein, 10 aa, Artificial Sequence
  Artificially Synthesized Peptide
RLVHRDLAAR

SEQ ID NO: 3545 - protein, 8 aa, Artificial Sequence
  Artificially Synthesized Peptide
RMARDPQR

SEQ ID NO: 3546 - protein, 9 aa, Artificial Sequence
  Artificially Synthesized Peptide
RNPHQALLH

SEQ ID NO: 3547 - protein, 10 aa, Artificial Sequence
  Artificially Synthesized Peptide
RNVLVKSPNH

SEQ ID NO: 3548 - protein, 8 aa, Artificial Sequence
  Artificially Synthesized Peptide
RSLTEILK

SEQ ID NO: 3549 - protein, 10 aa, Artificial Sequence
  Artificially Synthesized Peptide
RTVCAGGCAR

SEQ ID NO: 3550 - protein, 10 aa, Artificial Sequence
  Artificially Synthesized Peptide
RVCYGLGMEH

SEQ ID NO: 3551 - protein, 8 aa, Artificial Sequence
  Artificially Synthesized Peptide
RVLQGLPR

SEQ ID NO: 3552 - protein, 10 aa, Artificial Sequence
  Artificially Synthesized Peptide
RVLQGLPREY

SEQ ID NO: 3553 - protein, 11 aa, Artificial Sequence
  Artificially Synthesized Peptide
SANIQEFAGCK

SEQ ID NO: 3554 - protein, 9 aa, Artificial Sequence
  Artificially Synthesized Peptide
SCTLVCPLH

SEQ ID NO: 3555 - protein, 8 aa, Artificial Sequence
  Artificially Synthesized Peptide
SCVDLDDK

SEQ ID NO: 3556 - protein, 8 aa, Artificial Sequence
  Artificially Synthesized Peptide
SCVTACPY

SEQ ID NO: 3557 - protein, 10 aa, Artificial Sequence
  Artificially Synthesized Peptide
SCVTACPYNY

SEQ ID NO: 3558 - protein, 8 aa, Artificial Sequence
  Artificially Synthesized Peptide
SDCLACLH

SEQ ID NO: 3559 - protein, 11 aa, Artificial Sequence
  Artificially Synthesized Peptide
SDCLACLHFNH

SEQ ID NO: 3560 - protein, 8 aa, Artificial Sequence
  Artificially Synthesized Peptide
SGAFGTVY

SEQ ID NO: 3561 - protein, 9 aa, Artificial Sequence
  Artificially Synthesized Peptide
SGAFGTVYK

SEQ ID NO: 3562 - protein, 11 aa, Artificial Sequence
  Artificially Synthesized Peptide
SGAMPNQAQMR

SEQ ID NO: 3563 - protein, 8 aa, Artificial Sequence
  Artificially Synthesized Peptide
SGLALIHH

SEQ ID NO: 3564 - protein, 11 aa, Artificial Sequence
  Artificially Synthesized Peptide
SGLALIHHNTH

SEQ ID NO: 3565 - protein, 9 aa, Artificial Sequence
  Artificially Synthesized Peptide
SGVKPDLSY

SEQ ID NO: 3566 - protein, 9 aa, Artificial Sequence
  Artificially Synthesized Peptide
SILRRRFTH

SEQ ID NO: 3567 - protein, 8 aa, Artificial Sequence
  Artificially Synthesized Peptide
SMPNPEGR

SEQ ID NO: 3568 - protein, 9 aa, Artificial Sequence
  Artificially Synthesized Peptide
SMPNPEGRY

SEQ ID NO: 3569 - protein, 10 aa, Artificial Sequence
  Artificially Synthesized Peptide
SSEDCQSLTR

SEQ ID NO: 3570 - protein, 11 aa, Artificial Sequence
  Artificially Synthesized Peptide
STQVCTGTDMK

SEQ ID NO: 3571 - protein, 10 aa, Artificial Sequence
  Artificially Synthesized Peptide
SVFQNLQVIR

SEQ ID NO: 3572 - protein, 8 aa, Artificial Sequence
  Artificially Synthesized Peptide
TAEDGTQR

SEQ ID NO: 3573 - protein, 11 aa, Artificial Sequence
  Artificially Synthesized Peptide
TAEDGTQRCEK

SEQ ID NO: 3574 - protein, 8 aa, Artificial Sequence
  Artificially Synthesized Peptide
TCSPQPEY

SEQ ID NO: 3575 - protein, 11 aa, Artificial Sequence
  Artificially Synthesized Peptide
TFESMPNPEGR

SEQ ID NO: 3576 - protein, 9 aa, Artificial Sequence
  Artificially Synthesized Peptide
TGASPGGLR

SEQ ID NO: 3577 - protein, 8 aa, Artificial Sequence
  Artificially Synthesized Peptide
TGTDMKLR

SEQ ID NO: 3578 - protein, 10 aa, Artificial Sequence
  Artificially Synthesized Peptide
TIDVYMIMVK

SEQ ID NO: 3579 - protein, 9 aa, Artificial Sequence
  Artificially Synthesized Peptide
TILWKDIFH

SEQ ID NO: 3580 - protein, 10 aa, Artificial Sequence
  Artificially Synthesized Peptide
TILWKDIFHK

SEQ ID NO: 3581 - protein, 8 aa, Artificial Sequence
  Artificially Synthesized Peptide
TLEEITGY

SEQ ID NO: 3582 - protein, 10 aa, Artificial Sequence
  Artificially Synthesized Peptide
TLEEITGYLY

SEQ ID NO: 3583 - protein, 9 aa, Artificial Sequence
  Artificially Synthesized Peptide
TLIDTNRSR

SEQ ID NO: 3584 - protein, 11 aa, Artificial Sequence
  Artificially Synthesized Peptide
TLSPGKNGVVK

SEQ ID NO: 3585 - protein, 8 aa, Artificial Sequence
  Artificially Synthesized Peptide
TNRSRACH

SEQ ID NO: 3586 - protein, 9 aa, Artificial Sequence
  Artificially Synthesized Peptide
TVCAGGCAR

SEQ ID NO: 3587 - protein, 11 aa, Artificial Sequence
  Artificially Synthesized Peptide
TVCAGGCARCK

SEQ ID NO: 3588 - protein, 11 aa, Artificial Sequence
  Artificially Synthesized Peptide
TVPLPSETDGY

SEQ ID NO: 3589 - protein, 9 aa, Artificial Sequence
  Artificially Synthesized Peptide
TVPWDQLFR

SEQ ID NO: 3590 - protein, 11 aa, Artificial Sequence
  Artificially Synthesized Peptide
TVQLVTQLMPY

SEQ ID NO: 3591 - protein, 11 aa, Artificial Sequence
  Artificially Synthesized Peptide
TVWELMTFGAK

SEQ ID NO: 3592 - protein, 9 aa, Artificial Sequence
  Artificially Synthesized Peptide
VARCPSGVK

SEQ ID NO: 3593 - protein, 8 aa, Artificial Sequence
  Artificially Synthesized Peptide
VCAGGCAR

SEQ ID NO: 3594 - protein, 10 aa, Artificial Sequence
  Artificially Synthesized Peptide
VCAGGCARCK

SEQ ID NO: 3595 - protein, 8 aa, Artificial Sequence
  Artificially Synthesized Peptide
VCTGTDMK

SEQ ID NO: 3596 - protein, 10 aa, Artificial Sequence
  Artificially Synthesized Peptide
VCTGTDMKLR

SEQ ID NO: 3597 - protein, 9 aa, Artificial Sequence
  Artificially Synthesized Peptide
VCYGLGMEH

SEQ ID NO: 3598 - protein, 11 aa, Artificial Sequence
  Artificially Synthesized Peptide
VCYGLGMEHLR

SEQ ID NO: 3599 - protein, 11 aa, Artificial Sequence
  Artificially Synthesized Peptide
VFETLEEITGY

SEQ ID NO: 3600 - protein, 8 aa, Artificial Sequence
  Artificially Synthesized Peptide
VFGILIKR

SEQ ID NO: 3601 - protein, 9 aa, Artificial Sequence
  Artificially Synthesized Peptide
VFGILIKRR

SEQ ID NO: 3602 - protein, 9 aa, Artificial Sequence
  Artificially Synthesized Peptide
VFQNLQVIR

SEQ ID NO: 3603 - protein, 11 aa, Artificial Sequence
  Artificially Synthesized Peptide
VFQNLQVIRGR

SEQ ID NO: 3604 - protein, 8 aa, Artificial Sequence
  Artificially Synthesized Peptide
VGEGLACH

SEQ ID NO: 3605 - protein, 11 aa, Artificial Sequence
  Artificially Synthesized Peptide
VGSCTLVCPLH

SEQ ID NO: 3606 - protein, 8 aa, Artificial Sequence
  Artificially Synthesized Peptide
VGSPYVSR

SEQ ID NO: 3607 - protein, 8 aa, Artificial Sequence
  Artificially Synthesized Peptide
VIRGRILH

SEQ ID NO: 3608 - protein, 11 aa, Artificial Sequence
  Artificially Synthesized Peptide
VLGSGAFGTVY

SEQ ID NO: 3609 - protein, 11 aa, Artificial Sequence
  Artificially Synthesized Peptide
VLGVVFGILIK

SEQ ID NO: 3610 - protein, 9 aa, Artificial Sequence
  Artificially Synthesized Peptide
VLIAHNQVR

SEQ ID NO: 3611 - protein, 11 aa, Artificial Sequence
  Artificially Synthesized Peptide
VLIQRNPQLCY

SEQ ID NO: 3612 - protein, 9 aa, Artificial Sequence
  Artificially Synthesized Peptide
VLQGLPREY

SEQ ID NO: 3613 - protein, 9 aa, Artificial Sequence
  Artificially Synthesized Peptide
VLRENTSPK

SEQ ID NO: 3614 - protein, 8 aa, Artificial Sequence
  Artificially Synthesized Peptide
VLVKSPNH

SEQ ID NO: 3615 - protein, 10 aa, Artificial Sequence
  Artificially Synthesized Peptide
VLVKSPNHVK

SEQ ID NO: 3616 - protein, 9 aa, Artificial Sequence
  Artificially Synthesized Peptide
VMAGVGSPY

SEQ ID NO: 3617 - protein, 10 aa, Artificial Sequence
  Artificially Synthesized Peptide
VNARHCLPCH

SEQ ID NO: 3618 - protein, 8 aa, Artificial Sequence
  Artificially Synthesized Peptide
VNCSQFLR

SEQ ID NO: 3619 - protein, 9 aa, Artificial Sequence
  Artificially Synthesized Peptide
VSEFSRMAR

SEQ ID NO: 3620 - protein, 8 aa, Artificial Sequence
  Artificially Synthesized Peptide
VTACPYNY

SEQ ID NO: 3621 - protein, 9 aa, Artificial Sequence
  Artificially Synthesized Peptide
VTAEDGTQR

SEQ ID NO: 3622 - protein, 10 aa, Artificial Sequence
  Artificially Synthesized Peptide
VTGASPGGLR

SEQ ID NO: 3623 - protein, 8 aa, Artificial Sequence
  Artificially Synthesized Peptide
VVFGILIK

SEQ ID NO: 3624 - protein, 9 aa, Artificial Sequence
  Artificially Synthesized Peptide
VVFGILIKR

SEQ ID NO: 3625 - protein, 10 aa, Artificial Sequence
  Artificially Synthesized Peptide
VVFGILIKRR

SEQ ID NO: 3626 - protein, 10 aa, Artificial Sequence
  Artificially Synthesized Peptide
VVQGNLELTY

SEQ ID NO: 3627 - protein, 11 aa, Artificial Sequence
  Artificially Synthesized Peptide
WCMQIAKGMSY

SEQ ID NO: 3628 - protein, 8 aa, Artificial Sequence
  Artificially Synthesized Peptide
WDQDPPER

SEQ ID NO: 3629 - protein, 9 aa, Artificial Sequence
  Artificially Synthesized Peptide
WDQLFRNPH

SEQ ID NO: 3630 - protein, 9 aa, Artificial Sequence
  Artificially Synthesized Peptide
WIPDGENVK

SEQ ID NO: 3631 - protein, 8 aa, Artificial Sequence
  Artificially Synthesized Peptide
WLGLRSLR

SEQ ID NO: 3632 - protein, 9 aa, Artificial Sequence
  Artificially Synthesized Peptide
WMALESILR

SEQ ID NO: 3633 - protein, 10 aa, Artificial Sequence
  Artificially Synthesized Peptide
WMALESILRR

SEQ ID NO: 3634 - protein, 11 aa, Artificial Sequence
  Artificially Synthesized Peptide
WMALESILRRR

SEQ ID NO: 3635 - protein, 8 aa, Artificial Sequence
  Artificially Synthesized Peptide
WMIDSECR

SEQ ID NO: 3636 - protein, 10 aa, Artificial Sequence
  Artificially Synthesized Peptide
WMIDSECRPR

SEQ ID NO: 3637 - protein, 9 aa, Artificial Sequence
  Artificially Synthesized Peptide
YGCLLDHVR

SEQ ID NO: 3638 - protein, 9 aa, Artificial Sequence
  Artificially Synthesized Peptide
YGLGMEHLR

SEQ ID NO: 3639 - protein, 9 aa, Artificial Sequence
  Artificially Synthesized Peptide
YLEDVRLVH

SEQ ID NO: 3640 - protein, 10 aa, Artificial Sequence
  Artificially Synthesized Peptide
YLEDVRLVHR

SEQ ID NO: 3641 - protein, 10 aa, Artificial Sequence
  Artificially Synthesized Peptide
YVLIAHNQVR

SEQ ID NO: 3642 - protein, 10 aa, Artificial Sequence
  Artificially Synthesized Peptide
YVMAGVGSPY

SEQ ID NO: 3643 - protein, 11 aa, Artificial Sequence
  Artificially Synthesized Peptide
YVNARHCLPCH

SEQ ID NO: 3644 - protein, 8 aa, Artificial Sequence
  Artificially Synthesized Peptide
YVNQPDVR

SEQ ID NO: 3645 - protein, 8 aa, Artificial Sequence
  Artificially Synthesized Peptide
AFDNLYYW

SEQ ID NO: 3646 - protein, 9 aa, Artificial Sequence
  Artificially Synthesized Peptide
AFGTVYKGI

SEQ ID NO: 3647 - protein, 10 aa, Artificial Sequence
  Artificially Synthesized Peptide
AFGTVYKGIW

SEQ ID NO: 3648 - protein, 11 aa, Artificial Sequence
  Artificially Synthesized Peptide
AFGTVYKGIWI

SEQ ID NO: 3649 - protein, 9 aa, Artificial Sequence
  Artificially Synthesized Peptide
AFSPAFDNL

SEQ ID NO: 3650 - protein, 10 aa, Artificial Sequence
  Artificially Synthesized Peptide
AMPNQAQMRI

SEQ ID NO: 3651 - protein, 11 aa, Artificial Sequence
  Artificially Synthesized Peptide
AMPNQAQMRIL

SEQ ID NO: 3652 - protein, 9 aa, Artificial Sequence
  Artificially Synthesized Peptide
AWPDSLPDL

SEQ ID NO: 3653 - protein, 9 aa, Artificial Sequence
  Artificially Synthesized Peptide
AYSLTLQGL

SEQ ID NO: 3654 - protein, 11 aa, Artificial Sequence
  Artificially Synthesized Peptide
AYSLTLQGLGI

SEQ ID NO: 3655 - protein, 8 aa, Artificial Sequence
  Artificially Synthesized Peptide
CFVHTVPW

SEQ ID NO: 3656 - protein, 11 aa, Artificial Sequence
  Artificially Synthesized Peptide
CFVHTVPWDQL

SEQ ID NO: 3657 - protein, 11 aa, Artificial Sequence
  Artificially Synthesized Peptide
CMQIAKGMSYL

SEQ ID NO: 3658 - protein, 9 aa, Artificial Sequence
  Artificially Synthesized Peptide
CYGLGMEHL

SEQ ID NO: 3659 - protein, 8 aa, Artificial Sequence
  Artificially Synthesized Peptide
CYQDTILW

SEQ ID NO: 3660 - protein, 11 aa, Artificial Sequence
  Artificially Synthesized Peptide
CYQDTILWKDI

SEQ ID NO: 3661 - protein, 8 aa, Artificial Sequence
  Artificially Synthesized Peptide
DFGLARLL

SEQ ID NO: 3662 - protein, 10 aa, Artificial Sequence
  Artificially Synthesized Peptide
DFGLARLLDI

SEQ ID NO: 3663 - protein, 8 aa, Artificial Sequence
  Artificially Synthesized Peptide
EFAGCKKI

SEQ ID NO: 3664 - protein, 9 aa, Artificial Sequence
  Artificially Synthesized Peptide
EFAGCKKIF

SEQ ID NO: 3665 - protein, 11 aa, Artificial Sequence
  Artificially Synthesized Peptide
EYHADGGKVPI

SEQ ID NO: 3666 - protein, 9 aa, Artificial Sequence
  Artificially Synthesized Peptide
EYLVPQQGF

SEQ ID NO: 3667 - protein, 10 aa, Artificial Sequence
  Artificially Synthesized Peptide
EYLVPQQGFF

SEQ ID NO: 3668 - protein, 9 aa, Artificial Sequence
  Artificially Synthesized Peptide
EYVNARHCL

SEQ ID NO: 3669 - protein, 8 aa, Artificial Sequence
  Artificially Synthesized Peptide
GMGAAKGL

SEQ ID NO: 3670 - protein, 11 aa, Artificial Sequence
  Artificially Synthesized Peptide
GMGAAKGLQSL

SEQ ID NO: 3671 - protein, 10 aa, Artificial Sequence
  Artificially Synthesized Peptide
GMSYLEDVRL

SEQ ID NO: 3672 - protein, 8 aa, Artificial Sequence
  Artificially Synthesized Peptide
GYLYISAW

SEQ ID NO: 3673 - protein, 10 aa, Artificial Sequence
  Artificially Synthesized Peptide
HFNHSGICEL

SEQ ID NO: 3674 - protein, 8 aa, Artificial Sequence
  Artificially Synthesized Peptide
IFGSLAFL

SEQ ID NO: 3675 - protein, 8 aa, Artificial Sequence
  Artificially Synthesized Peptide
IFHKNNQL

SEQ ID NO: 3676 - protein, 10 aa, Artificial Sequence
  Artificially Synthesized Peptide
IFHKNNQLAL

SEQ ID NO: 3677 - protein, 8 aa, Artificial Sequence
  Artificially Synthesized Peptide
IMVKCWMI

SEQ ID NO: 3678 - protein, 11 aa, Artificial Sequence
  Artificially Synthesized Peptide
IWIPDGENVKI

SEQ ID NO: 3679 - protein, 8 aa, Artificial Sequence
  Artificially Synthesized Peptide
KWMALESI

SEQ ID NO: 3680 - protein, 9 aa, Artificial Sequence
  Artificially Synthesized Peptide
KWMALESIL

SEQ ID NO: 3681 - protein, 8 aa, Artificial Sequence
  Artificially Synthesized Peptide
KYTMRRLL

SEQ ID NO: 3682 - protein, 8 aa, Artificial Sequence
  Artificially Synthesized Peptide
LFEDNYAL

SEQ ID NO: 3683 - protein, 11 aa, Artificial Sequence
  Artificially Synthesized Peptide
LFEDNYALAVL

SEQ ID NO: 3684 - protein, 9 aa, Artificial Sequence
  Artificially Synthesized Peptide
LFRNPHQAL

SEQ ID NO: 3685 - protein, 10 aa, Artificial Sequence
  Artificially Synthesized Peptide
LFRNPHQALL

SEQ ID NO: 3686 - protein, 8 aa, Artificial Sequence
  Artificially Synthesized Peptide
LMPYGCLL

SEQ ID NO: 3687 - protein, 10 aa, Artificial Sequence
  Artificially Synthesized Peptide
LYISAWPDSL

SEQ ID NO: 3688 - protein, 9 aa, Artificial Sequence
  Artificially Synthesized Peptide
PMCKGSRCW

SEQ ID NO: 3689 - protein, 10 aa, Artificial Sequence
  Artificially Synthesized Peptide
PYDGIPAREI

SEQ ID NO: 3690 - protein, 9 aa, Artificial Sequence
  Artificially Synthesized Peptide
PYVSRLLGI

SEQ ID NO: 3691 - protein, 11 aa, Artificial Sequence
  Artificially Synthesized Peptide
PYVSRLLGICL

SEQ ID NO: 3692 - protein, 10 aa, Artificial Sequence
  Artificially Synthesized Peptide
QMRILKETEL

SEQ ID NO: 3693 - protein, 9 aa, Artificial Sequence
  Artificially Synthesized Peptide
RFRELVSEF

SEQ ID NO: 3694 - protein, 9 aa, Artificial Sequence
  Artificially Synthesized Peptide
RFTHQSDVW

SEQ ID NO: 3695 - protein, 10 aa, Artificial Sequence
  Artificially Synthesized Peptide
RFVVIQNEDL

SEQ ID NO: 3696 - protein, 9 aa, Artificial Sequence
  Artificially Synthesized Peptide
RMARDPQRF

SEQ ID NO: 3697 - protein, 8 aa, Artificial Sequence
  Artificially Synthesized Peptide
RWGLLLAL

SEQ ID NO: 3698 - protein, 9 aa, Artificial Sequence
  Artificially Synthesized Peptide
RWGLLLALL

SEQ ID NO: 3699 - protein, 10 aa, Artificial Sequence
  Artificially Synthesized Peptide
RYSEDPTVPL

SEQ ID NO: 3700 - protein, 11 aa, Artificial Sequence
  Artificially Synthesized Peptide
SMPNPEGRYTF

SEQ ID NO: 3701 - protein, 8 aa, Artificial Sequence
  Artificially Synthesized Peptide
SWLGLRSL

SEQ ID NO: 3702 - protein, 11 aa, Artificial Sequence
  Artificially Synthesized Peptide
SWLGLRSLREL

SEQ ID NO: 3703 - protein, 9 aa, Artificial Sequence
  Artificially Synthesized Peptide
SYGVTVWEL

SEQ ID NO: 3704 - protein, 8 aa, Artificial Sequence
  Artificially Synthesized Peptide
SYLEDVRL

SEQ ID NO: 3705 - protein, 8 aa, Artificial Sequence
  Artificially Synthesized Peptide
SYMPIWKF

SEQ ID NO: 3706 - protein, 10 aa, Artificial Sequence
  Artificially Synthesized Peptide
TFGAKPYDGI

SEQ ID NO: 3707 - protein, 11 aa, Artificial Sequence
  Artificially Synthesized Peptide
TMRRLLQETEL

SEQ ID NO: 3708 - protein, 9 aa, Artificial Sequence
  Artificially Synthesized Peptide
TYLPTNASL

SEQ ID NO: 3709 - protein, 11 aa, Artificial Sequence
  Artificially Synthesized Peptide
TYLPTNASLSF

SEQ ID NO: 3710 - protein, 8 aa, Artificial Sequence
  Artificially Synthesized Peptide
VFETLEEI

SEQ ID NO: 3711 - protein, 8 aa, Artificial Sequence
  Artificially Synthesized Peptide
VFQNLQVI

SEQ ID NO: 3712 - protein, 9 aa, Artificial Sequence
  Artificially Synthesized Peptide
VWSYGVTVW

SEQ ID NO: 3713 - protein, 11 aa, Artificial Sequence
  Artificially Synthesized Peptide
VWSYGVTVWEL

SEQ ID NO: 3714 - protein, 9 aa, Artificial Sequence
  Artificially Synthesized Peptide
VYMIMVKCW

SEQ ID NO: 3715 - protein, 11 aa, Artificial Sequence
  Artificially Synthesized Peptide
VYMIMVKCWMI

SEQ ID NO: 3716 - protein, 8 aa, Artificial Sequence
  Artificially Synthesized Peptide
WMALESIL

SEQ ID NO: 3717 - protein, 11 aa, Artificial Sequence
  Artificially Synthesized Peptide
WMIDSECRPRF

SEQ ID NO: 3718 - protein, 8 aa, Artificial Sequence
  Artificially Synthesized Peptide
YMIMVKCW

SEQ ID NO: 3719 - protein, 10 aa, Artificial Sequence
  Artificially Synthesized Peptide
YMIMVKCWMI

SEQ ID NO: 3720 - protein, 15 aa, Artificial Sequence
  Artificially Synthesized Peptide
ACPYNYLSTDVGSCT

SEQ ID NO: 3721 - protein, 15 aa, Artificial Sequence
  Artificially Synthesized Peptide
AIKVLRENTSPKANK

SEQ ID NO: 3722 - protein, 15 aa, Artificial Sequence
  Artificially Synthesized Peptide
AKGLQSLPTHDPSPL

SEQ ID NO: 3723 - protein, 15 aa, Artificial Sequence
  Artificially Synthesized Peptide
AKPYDGIPAREIPDL

SEQ ID NO: 3724 - protein, 15 aa, Artificial Sequence
  Artificially Synthesized Peptide
ARLLDIDETEYHADG

SEQ ID NO: 3725 - protein, 15 aa, Artificial Sequence
  Artificially Synthesized Peptide
ARNVLVKSPNHVKIT

SEQ ID NO: 3726 - protein, 15 aa, Artificial Sequence
  Artificially Synthesized Peptide
ASPLTSIISAVVGIL

SEQ ID NO: 3727 - protein, 15 aa, Artificial Sequence
  Artificially Synthesized Peptide
AYSLTLQGLGISWLG

SEQ ID NO: 3728 - protein, 15 aa, Artificial Sequence
  Artificially Synthesized Peptide
AYVMAGVGSPYVSRL

SEQ ID NO: 3729 - protein, 15 aa, Artificial Sequence
  Artificially Synthesized Peptide
CKKIFGSLAFLPESF

SEQ ID NO: 3730 - protein, 15 aa, Artificial Sequence
  Artificially Synthesized Peptide
CLHFNHSGICELHCP

SEQ ID NO: 3731 - protein, 15 aa, Artificial Sequence
  Artificially Synthesized Peptide
CMQIAKGMSYLEDVR

SEQ ID NO: 3732 - protein, 15 aa, Artificial Sequence
  Artificially Synthesized Peptide
CPALVTYNTDTFESM

SEQ ID NO: 3733 - protein, 15 aa, Artificial Sequence
  Artificially Synthesized Peptide
CQSLTRTVCAGGCAR

SEQ ID NO: 3734 - protein, 15 aa, Artificial Sequence
  Artificially Synthesized Peptide
CVDLDDKGCPAEQRA

SEQ ID NO: 3735 - protein, 15 aa, Artificial Sequence
  Artificially Synthesized Peptide
CYGLGMEHLREVRAV

SEQ ID NO: 3736 - protein, 15 aa, Artificial Sequence
  Artificially Synthesized Peptide
DEAYVMAGVGSPYVS

SEQ ID NO: 3737 - protein, 15 aa, Artificial Sequence
  Artificially Synthesized Peptide
DECVGEGLACHQLCA

SEQ ID NO: 3738 - protein, 15 aa, Artificial Sequence
  Artificially Synthesized Peptide
DGDLGMGAAKGLQSL

SEQ ID NO: 3739 - protein, 15 aa, Artificial Sequence
  Artificially Synthesized Peptide
DGYVAPLTCSPQPEY

SEQ ID NO: 3740 - protein, 15 aa, Artificial Sequence
  Artificially Synthesized Peptide
DLTLGLEPSEEEAPR

SEQ ID NO: 3741 - protein, 15 aa, Artificial Sequence
  Artificially Synthesized Peptide
DMKLRLPASPETHLD

SEQ ID NO: 3742 - protein, 15 aa, Artificial Sequence
  Artificially Synthesized Peptide
DPPFCVARCPSGVKP

SEQ ID NO: 3743 - protein, 15 aa, Artificial Sequence
  Artificially Synthesized Peptide
DSTFYRSLLEDDDMG

SEQ ID NO: 3744 - protein, 15 aa, Artificial Sequence
  Artificially Synthesized Peptide
DVRLVHRDLAARNVL

SEQ ID NO: 3745 - protein, 15 aa, Artificial Sequence
  Artificially Synthesized Peptide
DVYMIMVKCWMIDSE

SEQ ID NO: 3746 - protein, 15 aa, Artificial Sequence
  Artificially Synthesized Peptide
ECRVLQGLPREYVNA

SEQ ID NO: 3747 - protein, 15 aa, Artificial Sequence
  Artificially Synthesized Peptide
EDNYALAVLDNGDPL

SEQ ID NO: 3748 - protein, 15 aa, Artificial Sequence
  Artificially Synthesized Peptide
EGPLPAARPAGATLE

SEQ ID NO: 3749 - protein, 15 aa, Artificial Sequence
  Artificially Synthesized Peptide
EGRYTFGASCVTACP

SEQ ID NO: 3750 - protein, 15 aa, Artificial Sequence
  Artificially Synthesized Peptide
ELTYLPTNASLSFLQ

SEQ ID NO: 3751 - protein, 15 aa, Artificial Sequence
  Artificially Synthesized Peptide
ESILRRRFTHQSDVW

SEQ ID NO: 3752 - protein, 15 aa, Artificial Sequence
  Artificially Synthesized Peptide
ETELRKVKVLGSGAF

SEQ ID NO: 3753 - protein, 15 aa, Artificial Sequence
  Artificially Synthesized Peptide
ETELVEPLTPSGAMP

SEQ ID NO: 3754 - protein, 15 aa, Artificial Sequence
  Artificially Synthesized Peptide
FRELVSEFSRMARDP

SEQ ID NO: 3755 - protein, 15 aa, Artificial Sequence
  Artificially Synthesized Peptide
FVVIQNEDLGPASPL

SEQ ID NO: 3756 - protein, 15 aa, Artificial Sequence
  Artificially Synthesized Peptide
GATLERPKTLSPGKN

SEQ ID NO: 3757 - protein, 15 aa, Artificial Sequence
  Artificially Synthesized Peptide
GCQVVQGNLELTYLP

SEQ ID NO: 3758 - protein, 15 aa, Artificial Sequence
  Artificially Synthesized Peptide
GDPLNNTTPVTGASP

SEQ ID NO: 3759 - protein, 15 aa, Artificial Sequence
  Artificially Synthesized Peptide
GEGLACHQLCARGHC

SEQ ID NO: 3760 - protein, 15 aa, Artificial Sequence
  Artificially Synthesized Peptide
GENVKIPVAIKVLRE

SEQ ID NO: 3761 - protein, 15 aa, Artificial Sequence
  Artificially Synthesized Peptide
GERLPQPPICTIDVY

SEQ ID NO: 3762 - protein, 15 aa, Artificial Sequence
  Artificially Synthesized Peptide
GGKVPIKWMALESIL

SEQ ID NO: 3763 - protein, 15 aa, Artificial Sequence
  Artificially Synthesized Peptide
GGVLIQRNPQLCYQD

SEQ ID NO: 3764 - protein, 15 aa, Artificial Sequence
  Artificially Synthesized Peptide
GHCWGPGPTQCVNCS

SEQ ID NO: 3765 - protein, 15 aa, Artificial Sequence
  Artificially Synthesized Peptide
GISWLGLRSLRELGS

SEQ ID NO: 3766 - protein, 15 aa, Artificial Sequence
  Artificially Synthesized Peptide
GLALIHHNTHLCFVH

SEQ ID NO: 3767 - protein, 15 aa, Artificial Sequence
  Artificially Synthesized Peptide
GLGISWLGLRSLREL

SEQ ID NO: 3768 - protein, 15 aa, Artificial Sequence
  Artificially Synthesized Peptide
GLLLALLPPGAASTQ

SEQ ID NO: 3769 - protein, 15 aa, Artificial Sequence
  Artificially Synthesized Peptide
GSDVFDGDLGMGAAK

SEQ ID NO: 3770 - protein, 15 aa, Artificial Sequence
  Artificially Synthesized Peptide
GSPYVSRLLGICLTS

SEQ ID NO: 3771 - protein, 15 aa, Artificial Sequence
  Artificially Synthesized Peptide
GTDMKLRLPASPETH

SEQ ID NO: 3772 - protein, 15 aa, Artificial Sequence
  Artificially Synthesized Peptide
GTVYKGIWIPDGENV

SEQ ID NO: 3773 - protein, 15 aa, Artificial Sequence
  Artificially Synthesized Peptide
GVTVWELMTFGAKPY

SEQ ID NO: 3774 - protein, 15 aa, Artificial Sequence
  Artificially Synthesized Peptide
GYLYISAWPDSLPDL

SEQ ID NO: 3775 - protein, 15 aa, Artificial Sequence
  Artificially Synthesized Peptide
HLCFVHTVPWDQLFR

SEQ ID NO: 3776 - protein, 15 aa, Artificial Sequence
  Artificially Synthesized Peptide
HNQVRQVPLQRLRIV

SEQ ID NO: 3777 - protein, 15 aa, Artificial Sequence
  Artificially Synthesized Peptide
HRDLAARNVLVKSPN

SEQ ID NO: 3778 - protein, 15 aa, Artificial Sequence
  Artificially Synthesized Peptide
HSGICELHCPALVTY

SEQ ID NO: 3779 - protein, 15 aa, Artificial Sequence
  Artificially Synthesized Peptide
HVKITDFGLARLLDI

SEQ ID NO: 3780 - protein, 15 aa, Artificial Sequence
  Artificially Synthesized Peptide
ICELHCPALVTYNTD

SEQ ID NO: 3781 - protein, 15 aa, Artificial Sequence
  Artificially Synthesized Peptide
ICTIDVYMIMVKCWM

SEQ ID NO: 3782 - protein, 15 aa, Artificial Sequence
  Artificially Synthesized Peptide
IKVLRENTSPKANKE

SEQ ID NO: 3783 - protein, 15 aa, Artificial Sequence
  Artificially Synthesized Peptide
IKWMALESILRRRFT

SEQ ID NO: 3784 - protein, 15 aa, Artificial Sequence
  Artificially Synthesized Peptide
ILLVVVLGVVFGILI

SEQ ID NO: 3785 - protein, 15 aa, Artificial Sequence
  Artificially Synthesized Peptide
IQEVQGYVLIAHNQV

SEQ ID NO: 3786 - protein, 15 aa, Artificial Sequence
  Artificially Synthesized Peptide
IRKYTMRRLLQETEL

SEQ ID NO: 3787 - protein, 15 aa, Artificial Sequence
  Artificially Synthesized Peptide
ISAVVGILLVVVLGV

SEQ ID NO: 3788 - protein, 15 aa, Artificial Sequence
  Artificially Synthesized Peptide
ISAWPDSLPDLSVFQ

SEQ ID NO: 3789 - protein, 15 aa, Artificial Sequence
  Artificially Synthesized Peptide
ISWLGLRSLRELGSG

SEQ ID NO: 3790 - protein, 15 aa, Artificial Sequence
  Artificially Synthesized Peptide
ITDFGLARLLDIDET

SEQ ID NO: 3791 - protein, 15 aa, Artificial Sequence
  Artificially Synthesized Peptide
ITGYLYISAWPDSLP

SEQ ID NO: 3792 - protein, 15 aa, Artificial Sequence
  Artificially Synthesized Peptide
KCWMIDSECRPRFRE

SEQ ID NO: 3793 - protein, 15 aa, Artificial Sequence
  Artificially Synthesized Peptide
KDVFAFGGAVENPEY

SEQ ID NO: 3794 - protein, 15 aa, Artificial Sequence
  Artificially Synthesized Peptide
KEILDEAYVMAGVGS

SEQ ID NO: 3795 - protein, 15 aa, Artificial Sequence
  Artificially Synthesized Peptide
KGPLPTDCCHEQCAA

SEQ ID NO: 3796 - protein, 15 aa, Artificial Sequence
  Artificially Synthesized Peptide
KIPVAIKVLRENTSP

SEQ ID NO: 3797 - protein, 15 aa, Artificial Sequence
  Artificially Synthesized Peptide
KPDLSYMPIWKFPDE

SEQ ID NO: 3798 - protein, 15 aa, Artificial Sequence
  Artificially Synthesized Peptide
KVKVLGSGAFGTVYK

SEQ ID NO: 3799 - protein, 15 aa, Artificial Sequence
  Artificially Synthesized Peptide
KVPIKWMALESILRR

SEQ ID NO: 3800 - protein, 15 aa, Artificial Sequence
  Artificially Synthesized Peptide
LAALCRWGLLLALLP

SEQ ID NO: 3801 - protein, 15 aa, Artificial Sequence
  Artificially Synthesized Peptide
LACLHFNHSGICELH

SEQ ID NO: 3802 - protein, 15 aa, Artificial Sequence
  Artificially Synthesized Peptide
LALLPPGAASTQVCT

SEQ ID NO: 3803 - protein, 15 aa, Artificial Sequence
  Artificially Synthesized Peptide
LAVLDNGDPLNNTTP

SEQ ID NO: 3804 - protein, 15 aa, Artificial Sequence
  Artificially Synthesized Peptide
LCRWGLLLALLPPGA

SEQ ID NO: 3805 - protein, 15 aa, Artificial Sequence
  Artificially Synthesized Peptide
LGVVFGILIKRRQQK

SEQ ID NO: 3806 - protein, 15 aa, Artificial Sequence
  Artificially Synthesized Peptide
LLALLPPGAASTQVC

SEQ ID NO: 3807 - protein, 15 aa, Artificial Sequence
  Artificially Synthesized Peptide
LLGICLTSTVQLVTQ

SEQ ID NO: 3808 - protein, 15 aa, Artificial Sequence
  Artificially Synthesized Peptide
LLNWCMQIAKGMSYL

SEQ ID NO: 3809 - protein, 15 aa, Artificial Sequence
  Artificially Synthesized Peptide
LLVVVLGVVFGILIK

SEQ ID NO: 3810 - protein, 15 aa, Artificial Sequence
  Artificially Synthesized Peptide
LQGLGISWLGLRSLR

SEQ ID NO: 3811 - protein, 15 aa, Artificial Sequence
  Artificially Synthesized Peptide
LQGLPREYVNARHCL

SEQ ID NO: 3812 - protein, 15 aa, Artificial Sequence
  Artificially Synthesized Peptide
LQRYSEDPTVPLPSE

SEQ ID NO: 3813 - protein, 15 aa, Artificial Sequence
  Artificially Synthesized Peptide
LQSLPTHDPSPLQRY

SEQ ID NO: 3814 - protein, 15 aa, Artificial Sequence
  Artificially Synthesized Peptide
LQVIRGRILHNGAYS

SEQ ID NO: 3815 - protein, 15 aa, Artificial Sequence
  Artificially Synthesized Peptide
LRELGSGLALIHHNT

SEQ ID NO: 3816 - protein, 15 aa, Artificial Sequence
  Artificially Synthesized Peptide
LRELQLRSLTEILKG

SEQ ID NO: 3817 - protein, 15 aa, Artificial Sequence
  Artificially Synthesized Peptide
LREVRAVTSANIQEF

SEQ ID NO: 3818 - protein, 15 aa, Artificial Sequence
  Artificially Synthesized Peptide
LRIVRGTQLFEDNYA

SEQ ID NO: 3819 - protein, 15 aa, Artificial Sequence
  Artificially Synthesized Peptide
LRKVKVLGSGAFGTV

SEQ ID NO: 3820 - protein, 15 aa, Artificial Sequence
  Artificially Synthesized Peptide
LRSLRELGSGLALIH

SEQ ID NO: 3821 - protein, 15 aa, Artificial Sequence
  Artificially Synthesized Peptide
LSVFQNLQVIRGRIL

SEQ ID NO: 3822 - protein, 15 aa, Artificial Sequence
  Artificially Synthesized Peptide
LTEILKGGVLIQRNP

SEQ ID NO: 3823 - protein, 15 aa, Artificial Sequence
  Artificially Synthesized Peptide
LTLIDTNRSRACHPC

SEQ ID NO: 3824 - protein, 15 aa, Artificial Sequence
  Artificially Synthesized Peptide
LTSIISAVVGILLVV

SEQ ID NO: 3825 - protein, 15 aa, Artificial Sequence
  Artificially Synthesized Peptide
LTYLPTNASLSFLQD

SEQ ID NO: 3826 - protein, 15 aa, Artificial Sequence
  Artificially Synthesized Peptide
LYYWDQDPPERGAPP

SEQ ID NO: 3827 - protein, 15 aa, Artificial Sequence
  Artificially Synthesized Peptide
MAGVGSPYVSRLLGI

SEQ ID NO: 3828 - protein, 15 aa, Artificial Sequence
  Artificially Synthesized Peptide
MEHLREVRAVTSANI

SEQ ID NO: 3829 - protein, 15 aa, Artificial Sequence
  Artificially Synthesized Peptide
MIMVKCWMIDSECRP

SEQ ID NO: 3830 - protein, 15 aa, Artificial Sequence
  Artificially Synthesized Peptide
MRILKETELRKVKVL

SEQ ID NO: 3831 - protein, 15 aa, Artificial Sequence
  Artificially Synthesized Peptide
MSYLEDVRLVHRDLA

SEQ ID NO: 3832 - protein, 15 aa, Artificial Sequence
  Artificially Synthesized Peptide
NEDLGPASPLDSTFY

SEQ ID NO: 3833 - protein, 15 aa, Artificial Sequence
  Artificially Synthesized Peptide
NGSVTCFGPEADQCV

SEQ ID NO: 3834 - protein, 15 aa, Artificial Sequence
  Artificially Synthesized Peptide
NGVVKDVFAFGGAVE

SEQ ID NO: 3835 - protein, 15 aa, Artificial Sequence
  Artificially Synthesized Peptide
NLELTYLPTNASLSF

SEQ ID NO: 3836 - protein, 15 aa, Artificial Sequence
  Artificially Synthesized Peptide
NLQVIRGRILHNGAY

SEQ ID NO: 3837 - protein, 15 aa, Artificial Sequence
  Artificially Synthesized Peptide
NLYYWDQDPPERGAP

SEQ ID NO: 3838 - protein, 15 aa, Artificial Sequence
  Artificially Synthesized Peptide
NNQLALTLIDTNRSR

SEQ ID NO: 3839 - protein, 15 aa, Artificial Sequence
  Artificially Synthesized Peptide
NPQLCYQDTILWKDI

SEQ ID NO: 3840 - protein, 15 aa, Artificial Sequence
  Artificially Synthesized Peptide
NTHLCFVHTVPWDQL

SEQ ID NO: 3841 - protein, 15 aa, Artificial Sequence
  Artificially Synthesized Peptide
PCPINCTHSCVDLDD

SEQ ID NO: 3842 - protein, 15 aa, Artificial Sequence
  Artificially Synthesized Peptide
PDSLPDLSVFQNLQV

SEQ ID NO: 3843 - protein, 15 aa, Artificial Sequence
  Artificially Synthesized Peptide
PEQLQVFETLEEITG

SEQ ID NO: 3844 - protein, 15 aa, Artificial Sequence
  Artificially Synthesized Peptide
PESFDGDPASNTAPL

SEQ ID NO: 3845 - protein, 15 aa, Artificial Sequence
  Artificially Synthesized Peptide
PEYVNQPDVRPQPPS

SEQ ID NO: 3846 - protein, 15 aa, Artificial Sequence
  Artificially Synthesized Peptide
PFCVARCPSGVKPDL

SEQ ID NO: 3847 - protein, 15 aa, Artificial Sequence
  Artificially Synthesized Peptide
PGGLRELQLRSLTEI

SEQ ID NO: 3848 - protein, 15 aa, Artificial Sequence
  Artificially Synthesized Peptide
PIKWMALESILRRRF

SEQ ID NO: 3849 - protein, 15 aa, Artificial Sequence
  Artificially Synthesized Peptide
PSGVKPDLSYMPIWK

SEQ ID NO: 3850 - protein, 15 aa, Artificial Sequence
  Artificially Synthesized Peptide
PSTFKGTPTAENPEY

SEQ ID NO: 3851 - protein, 15 aa, Artificial Sequence
  Artificially Synthesized Peptide
PYNYLSTDVGSCTLV

SEQ ID NO: 3852 - protein, 15 aa, Artificial Sequence
  Artificially Synthesized Peptide
QDTILWKDIFHKNNQ

SEQ ID NO: 3853 - protein, 15 aa, Artificial Sequence
  Artificially Synthesized Peptide
QECVEECRVLQGLPR

SEQ ID NO: 3854 - protein, 15 aa, Artificial Sequence
  Artificially Synthesized Peptide
QGFFCPDPAPGAGGM

SEQ ID NO: 3855 - protein, 15 aa, Artificial Sequence
  Artificially Synthesized Peptide
QGNLELTYLPTNASL

SEQ ID NO: 3856 - protein, 15 aa, Artificial Sequence
  Artificially Synthesized Peptide
QLALTLIDTNRSRAC

SEQ ID NO: 3857 - protein, 15 aa, Artificial Sequence
  Artificially Synthesized Peptide
QLCYQDTILWKDIFH

SEQ ID NO: 3858 - protein, 15 aa, Artificial Sequence
  Artificially Synthesized Peptide
QPDVRPQPPSPREGP

SEQ ID NO: 3859 - protein, 15 aa, Artificial Sequence
  Artificially Synthesized Peptide
QPPICTIDVYMIMVK

SEQ ID NO: 3860 - protein, 15 aa, Artificial Sequence
  Artificially Synthesized Peptide
QQGFFCPDPAPGAGG

SEQ ID NO: 3861 - protein, 15 aa, Artificial Sequence
  Artificially Synthesized Peptide
QQKIRKYTMRRLLQE

SEQ ID NO: 3862 - protein, 15 aa, Artificial Sequence
  Artificially Synthesized Peptide
QSDVWSYGVTVWELM

SEQ ID NO: 3863 - protein, 15 aa, Artificial Sequence
  Artificially Synthesized Peptide
QVPLQRLRIVRGTQL

SEQ ID NO: 3864 - protein, 15 aa, Artificial Sequence
  Artificially Synthesized Peptide
REYVNARHCLPCHPE

SEQ ID NO: 3865 - protein, 15 aa, Artificial Sequence
  Artificially Synthesized Peptide
RGRILHNGAYSLTLQ

SEQ ID NO: 3866 - protein, 15 aa, Artificial Sequence
  Artificially Synthesized Peptide
RGRLGSQDLLNWCMQ

SEQ ID NO: 3867 - protein, 15 aa, Artificial Sequence
  Artificially Synthesized Peptide
RHLYQGCQVVQGNLE

SEQ ID NO: 3868 - protein, 15 aa, Artificial Sequence
  Artificially Synthesized Peptide
RPRFRELVSEFSRMA

SEQ ID NO: 3869 - protein, 15 aa, Artificial Sequence
  Artificially Synthesized Peptide
RRLLQETELVEPLTP

SEQ ID NO: 3870 - protein, 15 aa, Artificial Sequence
  Artificially Synthesized Peptide
RSLLEDDDMGDLVDA

SEQ ID NO: 3871 - protein, 15 aa, Artificial Sequence
  Artificially Synthesized Peptide
RWGLLLALLPPGAAS

SEQ ID NO: 3872 - protein, 15 aa, Artificial Sequence
  Artificially Synthesized Peptide
RYTFGASCVTACPYN

SEQ ID NO: 3873 - protein, 15 aa, Artificial Sequence
  Artificially Synthesized Peptide
SAVVGILLVVVLGVV

SEQ ID NO: 3874 - protein, 15 aa, Artificial Sequence
  Artificially Synthesized Peptide
SDVWSYGVTVWELMT

SEQ ID NO: 3875 - protein, 15 aa, Artificial Sequence
  Artificially Synthesized Peptide
SLTLQGLGISWLGLR

SEQ ID NO: 3876 - protein, 15 aa, Artificial Sequence
  Artificially Synthesized Peptide
SQDLLNWCMQIAKGM

SEQ ID NO: 3877 - protein, 15 aa, Artificial Sequence
  Artificially Synthesized Peptide
SQFLRGQECVEECRV

SEQ ID NO: 3878 - protein, 15 aa, Artificial Sequence
  Artificially Synthesized Peptide
SRLLGICLTSTVQLV

SEQ ID NO: 3879 - protein, 15 aa, Artificial Sequence
  Artificially Synthesized Peptide
STDVGSCTLVCPLHN

SEQ ID NO: 3880 - protein, 15 aa, Artificial Sequence
  Artificially Synthesized Peptide
SYGVTVWELMTFGAK

SEQ ID NO: 3881 - protein, 15 aa, Artificial Sequence
  Artificially Synthesized Peptide
TAPLQPEQLQVFETL

SEQ ID NO: 3882 - protein, 15 aa, Artificial Sequence
  Artificially Synthesized Peptide
TDGYVAPLTCSPQPE

SEQ ID NO: 3883 - protein, 15 aa, Artificial Sequence
  Artificially Synthesized Peptide
TEILKGGVLIQRNPQ

SEQ ID NO: 3884 - protein, 15 aa, Artificial Sequence
  Artificially Synthesized Peptide
TELVEPLTPSGAMPN

SEQ ID NO: 3885 - protein, 15 aa, Artificial Sequence
  Artificially Synthesized Peptide
TIDVYMIMVKCWMID

SEQ ID NO: 3886 - protein, 15 aa, Artificial Sequence
  Artificially Synthesized Peptide
TQLFEDNYALAVLDN

SEQ ID NO: 3887 - protein, 15 aa, Artificial Sequence
  Artificially Synthesized Peptide
TQLMPYGCLLDHVRE

SEQ ID NO: 3888 - protein, 15 aa, Artificial Sequence
  Artificially Synthesized Peptide
TRTVCAGGCARCKGP

SEQ ID NO: 3889 - protein, 15 aa, Artificial Sequence
  Artificially Synthesized Peptide
TTPVTGASPGGLREL

SEQ ID NO: 3890 - protein, 15 aa, Artificial Sequence
  Artificially Synthesized Peptide
TVQLVTQLMPYGCLL

SEQ ID NO: 3891 - protein, 15 aa, Artificial Sequence
  Artificially Synthesized Peptide
VCPLHNQEVTAEDGT

SEQ ID NO: 3892 - protein, 15 aa, Artificial Sequence
  Artificially Synthesized Peptide
VEPLTPSGAMPNQAQ

SEQ ID NO: 3893 - protein, 15 aa, Artificial Sequence
  Artificially Synthesized Peptide
VGILLVVVLGVVFGI

SEQ ID NO: 3894 - protein, 15 aa, Artificial Sequence
  Artificially Synthesized Peptide
VHTVPWDQLFRNPHQ

SEQ ID NO: 3895 - protein, 15 aa, Artificial Sequence
  Artificially Synthesized Peptide
VLGVVFGILIKRRQQ

SEQ ID NO: 3896 - protein, 15 aa, Artificial Sequence
  Artificially Synthesized Peptide
VQLVTQLMPYGCLLD

SEQ ID NO: 3897 - protein, 15 aa, Artificial Sequence
  Artificially Synthesized Peptide
VRAVTSANIQEFAGC

SEQ ID NO: 3898 - protein, 15 aa, Artificial Sequence
  Artificially Synthesized Peptide
VRLVHRDLAARNVLV

SEQ ID NO: 3899 - protein, 15 aa, Artificial Sequence
  Artificially Synthesized Peptide
VRQVPLQRLRIVRGT

SEQ ID NO: 3900 - protein, 15 aa, Artificial Sequence
  Artificially Synthesized Peptide
VSRLLGICLTSTVQL

SEQ ID NO: 3901 - protein, 15 aa, Artificial Sequence
  Artificially Synthesized Peptide
VTQLMPYGCLLDHVR

SEQ ID NO: 3902 - protein, 15 aa, Artificial Sequence
  Artificially Synthesized Peptide
VVGILLVVVLGVVFG

SEQ ID NO: 3903 - protein, 15 aa, Artificial Sequence
  Artificially Synthesized Peptide
VWELMTFGAKPYDGI

SEQ ID NO: 3904 - protein, 15 aa, Artificial Sequence
  Artificially Synthesized Peptide
WGLLLALLPPGAAST

SEQ ID NO: 3905 - protein, 15 aa, Artificial Sequence
  Artificially Synthesized Peptide
YDGIPAREIPDLLEK

SEQ ID NO: 3906 - protein, 15 aa, Artificial Sequence
  Artificially Synthesized Peptide
YMIMVKCWMIDSECR

SEQ ID NO: 3907 - protein, 15 aa, Artificial Sequence
  Artificially Synthesized Peptide
YVLIAHNQVRQVPLQ

SEQ ID NO: 3908 - protein, 15 aa, Artificial Sequence
  Artificially Synthesized Peptide
AIKVLRENTSPKANK

SEQ ID NO: 3909 - protein, 15 aa, Artificial Sequence
  Artificially Synthesized Peptide
ARLLDIDETEYHADG

SEQ ID NO: 3910 - protein, 15 aa, Artificial Sequence
  Artificially Synthesized Peptide
CYGLGMEHLREVRAV

SEQ ID NO: 3911 - protein, 15 aa, Artificial Sequence
  Artificially Synthesized Peptide
DLTLGLEPSEEEAPR

SEQ ID NO: 3912 - protein, 15 aa, Artificial Sequence
  Artificially Synthesized Peptide
DNLYYWDQDPPERGA

SEQ ID NO: 3913 - protein, 15 aa, Artificial Sequence
  Artificially Synthesized Peptide
DTILWKDIFHKNNQL

SEQ ID NO: 3914 - protein, 15 aa, Artificial Sequence
  Artificially Synthesized Peptide
ETEYHADGGKVPIKW

SEQ ID NO: 3915 - protein, 15 aa, Artificial Sequence
  Artificially Synthesized Peptide
FRELVSEFSRMARDP

SEQ ID NO: 3916 - protein, 15 aa, Artificial Sequence
  Artificially Synthesized Peptide
FSRMARDPQRFVVIQ

SEQ ID NO: 3917 - protein, 15 aa, Artificial Sequence
  Artificially Synthesized Peptide
FVVIQNEDLGPASPL

SEQ ID NO: 3918 - protein, 15 aa, Artificial Sequence
  Artificially Synthesized Peptide
GDLVDAEEYLVPQQG

SEQ ID NO: 3919 - protein, 15 aa, Artificial Sequence
  Artificially Synthesized Peptide
GTQLFEDNYALAVLD

SEQ ID NO: 3920 - protein, 15 aa, Artificial Sequence
  Artificially Synthesized Peptide
IKWMALESILRRRFT

SEQ ID NO: 3921 - protein, 15 aa, Artificial Sequence
  Artificially Synthesized Peptide
IWKFPDEEGACQPCP

SEQ ID NO: 3922 - protein, 15 aa, Artificial Sequence
  Artificially Synthesized Peptide
KGPLPTDCCHEQCAA

SEQ ID NO: 3923 - protein, 15 aa, Artificial Sequence
  Artificially Synthesized Peptide
KNGVVKDVFAFGGAV

SEQ ID NO: 3924 - protein, 15 aa, Artificial Sequence
  Artificially Synthesized Peptide
LQGLPREYVNARHCL

SEQ ID NO: 3925 - protein, 15 aa, Artificial Sequence
  Artificially Synthesized Peptide
LQRYSEDPTVPLPSE

SEQ ID NO: 3926 - protein, 15 aa, Artificial Sequence
  Artificially Synthesized Peptide
LVTYNTDTFESMPNP

SEQ ID NO: 3927 - protein, 15 aa, Artificial Sequence
  Artificially Synthesized Peptide
MRRLLQETELVEPLT

SEQ ID NO: 3928 - protein, 15 aa, Artificial Sequence
  Artificially Synthesized Peptide
NKEILDEAYVMAGVG

SEQ ID NO: 3929 - protein, 15 aa, Artificial Sequence
  Artificially Synthesized Peptide
NQEVTAEDGTQRCEK

SEQ ID NO: 3930 - protein, 15 aa, Artificial Sequence
  Artificially Synthesized Peptide
PESFDGDPASNTAPL

SEQ ID NO: 3931 - protein, 15 aa, Artificial Sequence
  Artificially Synthesized Peptide
PSGVKPDLSYMPIWK

SEQ ID NO: 3932 - protein, 15 aa, Artificial Sequence
  Artificially Synthesized Peptide
QGFFCPDPAPGAGGM

SEQ ID NO: 3933 - protein, 15 aa, Artificial Sequence
  Artificially Synthesized Peptide
QMRILKETELRKVKV

SEQ ID NO: 3934 - protein, 15 aa, Artificial Sequence
  Artificially Synthesized Peptide
RSLLEDDDMGDLVDA

SEQ ID NO: 3935 - protein, 15 aa, Artificial Sequence
  Artificially Synthesized Peptide
SDVFDGDLGMGAAKG

SEQ ID NO: 3936 - protein, 15 aa, Artificial Sequence
  Artificially Synthesized Peptide
SLAFLPESFDGDPAS

SEQ ID NO: 3937 - protein, 15 aa, Artificial Sequence
  Artificially Synthesized Peptide
SLSFLQDIQEVQGYV

SEQ ID NO: 3938 - protein, 15 aa, Artificial Sequence
  Artificially Synthesized Peptide
TAPLQPEQLQVFETL

SEQ ID NO: 3939 - protein, 15 aa, Artificial Sequence
  Artificially Synthesized Peptide
TVPLPSETDGYVAPL

SEQ ID NO: 3940 - protein, 15 aa, Artificial Sequence
  Artificially Synthesized Peptide
VHTVPWDQLFRNPHQ

SEQ ID NO: 3941 - protein, 15 aa, Artificial Sequence
  Artificially Synthesized Peptide
VRLVHRDLAARNVLV

SEQ ID NO: 3942 - protein, 15 aa, Artificial Sequence
  Artificially Synthesized Peptide
VTCFGPEADQCVACA

SEQ ID NO: 3943 - protein, 15 aa, Artificial Sequence
  Artificially Synthesized Peptide
YNYLSTDVGSCTLVC

SEQ ID NO: 3944 - protein, 15 aa, Artificial Sequence
  Artificially Synthesized Peptide
YRSLLEDDDMGDLVD

SEQ ID NO: 3945 - protein, 15 aa, Artificial Sequence
  Artificially Synthesized Peptide
ALTLIDTNRSRACHP

SEQ ID NO: 3946 - protein, 15 aa, Artificial Sequence
  Artificially Synthesized Peptide
CWMIDSECRPRFREL

SEQ ID NO: 3947 - protein, 15 aa, Artificial Sequence
  Artificially Synthesized Peptide
GMSYLEDVRLVHRDL

SEQ ID NO: 3948 - protein, 15 aa, Artificial Sequence
  Artificially Synthesized Peptide
HSCVDLDDKGCPAEQ

SEQ ID NO: 3949 - protein, 15 aa, Artificial Sequence
  Artificially Synthesized Peptide
LALIHHNTHLCFVHT

SEQ ID NO: 3950 - protein, 15 aa, Artificial Sequence
  Artificially Synthesized Peptide
QGGAAPQPHPPPAFS

SEQ ID NO: 3951 - protein, 15 aa, Artificial Sequence
  Artificially Synthesized Peptide
RLPASPETHLDMLRH

SEQ ID NO: 3952 - protein, 15 aa, Artificial Sequence
  Artificially Synthesized Peptide
VLIAHNQVRQVPLQR

SEQ ID NO: 3953 - protein, 15 aa, Artificial Sequence
  Artificially Synthesized Peptide
WDQLFRNPHQALLHT

SEQ ID NO: 3954 - protein, 9 aa, Artificial Sequence
  Artificially Synthesized Peptide
YNYLSTDVG

SEQ ID NO: 3955 - protein, 9 aa, Artificial Sequence
  Artificially Synthesized Peptide
VLRENTSPK

SEQ ID NO: 3956 - protein, 9 aa, Artificial Sequence
  Artificially Synthesized Peptide
LQSLPTHDP

SEQ ID NO: 3957 - protein, 9 aa, Artificial Sequence
  Artificially Synthesized Peptide
YDGIPAREI

SEQ ID NO: 3958 - protein, 9 aa, Artificial Sequence
  Artificially Synthesized Peptide
LDIDETEYH

SEQ ID NO: 3959 - protein, 9 aa, Artificial Sequence
  Artificially Synthesized Peptide
VLVKSPNHV

SEQ ID NO: 3960 - protein, 9 aa, Artificial Sequence
  Artificially Synthesized Peptide
LTSIISAVV

SEQ ID NO: 3961 - protein, 9 aa, Artificial Sequence
  Artificially Synthesized Peptide
LTLQGLGIS

SEQ ID NO: 3962 - protein, 9 aa, Artificial Sequence
  Artificially Synthesized Peptide
MAGVGSPYV

SEQ ID NO: 3963 - protein, 9 aa, Artificial Sequence
  Artificially Synthesized Peptide
IFGSLAFLP

SEQ ID NO: 3964 - protein, 9 aa, Artificial Sequence
  Artificially Synthesized Peptide
FNHSGICEL

SEQ ID NO: 3965 - protein, 9 aa, Artificial Sequence
  Artificially Synthesized Peptide
IAKGMSYLE

SEQ ID NO: 3966 - protein, 9 aa, Artificial Sequence
  Artificially Synthesized Peptide
LVTYNTDTF

SEQ ID NO: 3967 - protein, 9 aa, Artificial Sequence
  Artificially Synthesized Peptide
LTRTVCAGG

SEQ ID NO: 3968 - protein, 9 aa, Artificial Sequence
  Artificially Synthesized Peptide
LDDKGCPAE

SEQ ID NO: 3969 - protein, 9 aa, Artificial Sequence
  Artificially Synthesized Peptide
LGMEHLREV

SEQ ID NO: 3970 - protein, 9 aa, Artificial Sequence
  Artificially Synthesized Peptide
YVMAGVGSP

SEQ ID NO: 3971 - protein, 9 aa, Artificial Sequence
  Artificially Synthesized Peptide
VGEGLACHQ

SEQ ID NO: 3972 - protein, 9 aa, Artificial Sequence
  Artificially Synthesized Peptide
LGMGAAKGL

SEQ ID NO: 3973 - protein, 9 aa, Artificial Sequence
  Artificially Synthesized Peptide
VAPLTCSPQ

SEQ ID NO: 3974 - protein, 9 aa, Artificial Sequence
  Artificially Synthesized Peptide
LGLEPSEEE

SEQ ID NO: 3975 - protein, 9 aa, Artificial Sequence
  Artificially Synthesized Peptide
LRLPASPET

SEQ ID NO: 3976 - protein, 9 aa, Artificial Sequence
  Artificially Synthesized Peptide
FCVARCPSG

SEQ ID NO: 3977 - protein, 9 aa, Artificial Sequence
  Artificially Synthesized Peptide
FYRSLLEDD

SEQ ID NO: 3978 - protein, 9 aa, Artificial Sequence
  Artificially Synthesized Peptide
LVHRDLAAR

SEQ ID NO: 3979 - protein, 9 aa, Artificial Sequence
  Artificially Synthesized Peptide
MIMVKCWMI

SEQ ID NO: 3980 - protein, 9 aa, Artificial Sequence
  Artificially Synthesized Peptide
VLQGLPREY

SEQ ID NO: 3981 - protein, 9 aa, Artificial Sequence
  Artificially Synthesized Peptide
YALAVLDNG

SEQ ID NO: 3982 - protein, 9 aa, Artificial Sequence
  Artificially Synthesized Peptide
LPAARPAGA

SEQ ID NO: 3983 - protein, 9 aa, Artificial Sequence
  Artificially Synthesized Peptide
YTFGASCVT

SEQ ID NO: 3984 - protein, 9 aa, Artificial Sequence
  Artificially Synthesized Peptide
YLPTNASLS

SEQ ID NO: 3985 - protein, 9 aa, Artificial Sequence
  Artificially Synthesized Peptide
LRRRFTHQS

SEQ ID NO: 3986 - protein, 9 aa, Artificial Sequence
  Artificially Synthesized Peptide
LRKVKVLGS

SEQ ID NO: 3987 - protein, 9 aa, Artificial Sequence
  Artificially Synthesized Peptide
LVEPLTPSG

SEQ ID NO: 3988 - protein, 9 aa, Artificial Sequence
  Artificially Synthesized Peptide
LVSEFSRMA

SEQ ID NO: 3989 - protein, 9 aa, Artificial Sequence
  Artificially Synthesized Peptide
IQNEDLGPA

SEQ ID NO: 3990 - protein, 9 aa, Artificial Sequence
  Artificially Synthesized Peptide
LERPKTLSP

SEQ ID NO: 3991 - protein, 9 aa, Artificial Sequence
  Artificially Synthesized Peptide
VVQGNLELT

SEQ ID NO: 3992 - protein, 9 aa, Artificial Sequence
  Artificially Synthesized Peptide
LNNTTPVTG

SEQ ID NO: 3993 - protein, 9 aa, Artificial Sequence
  Artificially Synthesized Peptide
LACHQLCAR

SEQ ID NO: 3994 - protein, 9 aa, Artificial Sequence
  Artificially Synthesized Peptide
VKIPVAIKV

SEQ ID NO: 3995 - protein, 9 aa, Artificial Sequence
  Artificially Synthesized Peptide
LPQPPICTI

SEQ ID NO: 3996 - protein, 9 aa, Artificial Sequence
  Artificially Synthesized Peptide
VPIKWMALE

SEQ ID NO: 3997 - protein, 9 aa, Artificial Sequence
  Artificially Synthesized Peptide
LIQRNPQLC

SEQ ID NO: 3998 - protein, 9 aa, Artificial Sequence
  Artificially Synthesized Peptide
WGPGPTQCV

SEQ ID NO: 3999 - protein, 9 aa, Artificial Sequence
  Artificially Synthesized Peptide
WLGLRSLRE

SEQ ID NO: 4000 - protein, 9 aa, Artificial Sequence
  Artificially Synthesized Peptide
LIHHNTHLC

SEQ ID NO: 4001 - protein, 9 aa, Artificial Sequence
  Artificially Synthesized Peptide
ISWLGLRSL

SEQ ID NO: 4002 - protein, 9 aa, Artificial Sequence
  Artificially Synthesized Peptide
LALLPPGAA

SEQ ID NO: 4003 - protein, 9 aa, Artificial Sequence
  Artificially Synthesized Peptide
VFDGDLGMG

SEQ ID NO: 4004 - protein, 9 aa, Artificial Sequence
  Artificially Synthesized Peptide
YVSRLLGIC

SEQ ID NO: 4005 - protein, 9 aa, Artificial Sequence
  Artificially Synthesized Peptide
MKLRLPASP

SEQ ID NO: 4006 - protein, 9 aa, Artificial Sequence
  Artificially Synthesized Peptide
YKGIWIPDG

SEQ ID NO: 4007 - protein, 9 aa, Artificial Sequence
  Artificially Synthesized Peptide
VWELMTFGA

SEQ ID NO: 4008 - protein, 9 aa, Artificial Sequence
  Artificially Synthesized Peptide
YISAWPDSL

SEQ ID NO: 4009 - protein, 9 aa, Artificial Sequence
  Artificially Synthesized Peptide
FVHTVPWDQ

SEQ ID NO: 4010 - protein, 9 aa, Artificial Sequence
  Artificially Synthesized Peptide
VRQVPLQRL

SEQ ID NO: 4011 - protein, 9 aa, Artificial Sequence
  Artificially Synthesized Peptide
LAARNVLVK

SEQ ID NO: 4012 - protein, 9 aa, Artificial Sequence
  Artificially Synthesized Peptide
ICELHCPAL

SEQ ID NO: 4013 - protein, 9 aa, Artificial Sequence
  Artificially Synthesized Peptide
ITDFGLARL

SEQ ID NO: 4014 - protein, 9 aa, Artificial Sequence
  Artificially Synthesized Peptide
LHCPALVTY

SEQ ID NO: 4015 - protein, 9 aa, Artificial Sequence
  Artificially Synthesized Peptide
IDVYMIMVK

SEQ ID NO: 4016 - protein, 9 aa, Artificial Sequence
  Artificially Synthesized Peptide
LRENTSPKA

SEQ ID NO: 4017 - protein, 9 aa, Artificial Sequence
  Artificially Synthesized Peptide
MALESILRR

SEQ ID NO: 4018 - protein, 9 aa, Artificial Sequence
  Artificially Synthesized Peptide
VVVLGVVFG

SEQ ID NO: 4019 - protein, 9 aa, Artificial Sequence
  Artificially Synthesized Peptide
VQGYVLIAH

SEQ ID NO: 4020 - protein, 9 aa, Artificial Sequence
  Artificially Synthesized Peptide
YTMRRLLQE

SEQ ID NO: 4021 - protein, 9 aa, Artificial Sequence
  Artificially Synthesized Peptide
VVGILLVVV

SEQ ID NO: 4022 - protein, 9 aa, Artificial Sequence
  Artificially Synthesized Peptide
WPDSLPDLS

SEQ ID NO: 4023 - protein, 9 aa, Artificial Sequence
  Artificially Synthesized Peptide
LGLRSLREL

SEQ ID NO: 4024 - protein, 9 aa, Artificial Sequence
  Artificially Synthesized Peptide
FGLARLLDI

SEQ ID NO: 4025 - protein, 9 aa, Artificial Sequence
  Artificially Synthesized Peptide
YLYISAWPD

SEQ ID NO: 4026 - protein, 9 aa, Artificial Sequence
  Artificially Synthesized Peptide
MIDSECRPR

SEQ ID NO: 4027 - protein, 9 aa, Artificial Sequence
  Artificially Synthesized Peptide
FAFGGAVEN

SEQ ID NO: 4028 - protein, 9 aa, Artificial Sequence
  Artificially Synthesized Peptide
LDEAYVMAG

SEQ ID NO: 4029 - protein, 9 aa, Artificial Sequence
  Artificially Synthesized Peptide
LPTDCCHEQ

SEQ ID NO: 4030 - protein, 9 aa, Artificial Sequence
  Artificially Synthesized Peptide
VAIKVLREN

SEQ ID NO: 4031 - protein, 9 aa, Artificial Sequence
  Artificially Synthesized Peptide
LSYMPIWKF

SEQ ID NO: 4032 - protein, 9 aa, Artificial Sequence
  Artificially Synthesized Peptide
VLGSGAFGT

SEQ ID NO: 4033 - protein, 9 aa, Artificial Sequence
  Artificially Synthesized Peptide
IKWMALESI

SEQ ID NO: 4034 - protein, 9 aa, Artificial Sequence
  Artificially Synthesized Peptide
LCRWGLLLA

SEQ ID NO: 4035 - protein, 9 aa, Artificial Sequence
  Artificially Synthesized Peptide
LHFNHSGIC

SEQ ID NO: 4036 - protein, 9 aa, Artificial Sequence
  Artificially Synthesized Peptide
LPPGAASTQ

SEQ ID NO: 4037 - protein, 9 aa, Artificial Sequence
  Artificially Synthesized Peptide
LDNGDPLNN

SEQ ID NO: 4038 - protein, 9 aa, Artificial Sequence
  Artificially Synthesized Peptide
WGLLLALLP

SEQ ID NO: 4039 - protein, 9 aa, Artificial Sequence
  Artificially Synthesized Peptide
VFGILIKRR

SEQ ID NO: 4040 - protein, 9 aa, Artificial Sequence
  Artificially Synthesized Peptide
LLPPGAAST

SEQ ID NO: 4041 - protein, 9 aa, Artificial Sequence
  Artificially Synthesized Peptide
ICLTSTVQL

SEQ ID NO: 4042 - protein, 9 aa, Artificial Sequence
  Artificially Synthesized Peptide
WCMQIAKGM

SEQ ID NO: 4043 - protein, 9 aa, Artificial Sequence
  Artificially Synthesized Peptide
VVLGVVFGI

SEQ ID NO: 4044 - protein, 9 aa, Artificial Sequence
  Artificially Synthesized Peptide
LGISWLGLR

SEQ ID NO: 4045 - protein, 9 aa, Artificial Sequence
  Artificially Synthesized Peptide
LPREYVNAR

SEQ ID NO: 4046 - protein, 9 aa, Artificial Sequence
  Artificially Synthesized Peptide
YSEDPTVPL

SEQ ID NO: 4047 - protein, 9 aa, Artificial Sequence
  Artificially Synthesized Peptide
LPTHDPSPL

SEQ ID NO: 4048 - protein, 9 aa, Artificial Sequence
  Artificially Synthesized Peptide
IRGRILHNG

SEQ ID NO: 4049 - protein, 9 aa, Artificial Sequence
  Artificially Synthesized Peptide
LGSGLALIH

SEQ ID NO: 4050 - protein, 9 aa, Artificial Sequence
  Artificially Synthesized Peptide
LQLRSLTEI

SEQ ID NO: 4051 - protein, 9 aa, Artificial Sequence
  Artificially Synthesized Peptide
VRAVTSANI

SEQ ID NO: 4052 - protein, 9 aa, Artificial Sequence
  Artificially Synthesized Peptide
VRGTQLFED

SEQ ID NO: 4053 - protein, 9 aa, Artificial Sequence
  Artificially Synthesized Peptide
VKVLGSGAF

SEQ ID NO: 4054 - protein, 9 aa, Artificial Sequence
  Artificially Synthesized Peptide
LRELGSGLA

SEQ ID NO: 4055 - protein, 9 aa, Artificial Sequence
  Artificially Synthesized Peptide
FQNLQVIRG

SEQ ID NO: 4056 - protein, 9 aa, Artificial Sequence
  Artificially Synthesized Peptide
ILKGGVLIQ

SEQ ID NO: 4057 - protein, 9 aa, Artificial Sequence
  Artificially Synthesized Peptide
IDTNRSRAC

SEQ ID NO: 4058 - protein, 9 aa, Artificial Sequence
  Artificially Synthesized Peptide
IISAVVGIL

SEQ ID NO: 4059 - protein, 9 aa, Artificial Sequence
  Artificially Synthesized Peptide
LPTNASLSF

SEQ ID NO: 4060 - protein, 9 aa, Artificial Sequence
  Artificially Synthesized Peptide
WDQDPPERG

SEQ ID NO: 4061 - protein, 9 aa, Artificial Sequence
  Artificially Synthesized Peptide
VGSPYVSRL

SEQ ID NO: 4062 - protein, 9 aa, Artificial Sequence
  Artificially Synthesized Peptide
LREVRAVTS

SEQ ID NO: 4063 - protein, 9 aa, Artificial Sequence
  Artificially Synthesized Peptide
VKCWMIDSE

SEQ ID NO: 4064 - protein, 9 aa, Artificial Sequence
  Artificially Synthesized Peptide
LKETELRKV

SEQ ID NO: 4065 - protein, 9 aa, Artificial Sequence
  Artificially Synthesized Peptide
LEDVRLVHR

SEQ ID NO: 4066 - protein, 9 aa, Artificial Sequence
  Artificially Synthesized Peptide
LGPASPLDS

SEQ ID NO: 4067 - protein, 9 aa, Artificial Sequence
  Artificially Synthesized Peptide
VTCFGPEAD

SEQ ID NO: 4068 - protein, 9 aa, Artificial Sequence
  Artificially Synthesized Peptide
VKDVFAFGG

SEQ ID NO: 4069 - protein, 9 aa, Artificial Sequence
  Artificially Synthesized Peptide
LTYLPTNAS

SEQ ID NO: 4070 - protein, 9 aa, Artificial Sequence
  Artificially Synthesized Peptide
VIRGRILHN

SEQ ID NO: 4071 - protein, 9 aa, Artificial Sequence
  Artificially Synthesized Peptide
YWDQDPPER

SEQ ID NO: 4072 - protein, 9 aa, Artificial Sequence
  Artificially Synthesized Peptide
LALTLIDTN

SEQ ID NO: 4073 - protein, 9 aa, Artificial Sequence
  Artificially Synthesized Peptide
LCYQDTILW

SEQ ID NO: 4074 - protein, 9 aa, Artificial Sequence
  Artificially Synthesized Peptide
LCFVHTVPW

SEQ ID NO: 4075 - protein, 9 aa, Artificial Sequence
  Artificially Synthesized Peptide
INCTHSCVD

SEQ ID NO: 4076 - protein, 9 aa, Artificial Sequence
  Artificially Synthesized Peptide
LPDLSVFQN

SEQ ID NO: 4077 - protein, 9 aa, Artificial Sequence
  Artificially Synthesized Peptide
LQVFETLEE

SEQ ID NO: 4078 - protein, 9 aa, Artificial Sequence
  Artificially Synthesized Peptide
FDGDPASNT

SEQ ID NO: 4079 - protein, 9 aa, Artificial Sequence
  Artificially Synthesized Peptide
VNQPDVRPQ

SEQ ID NO: 4080 - protein, 9 aa, Artificial Sequence
  Artificially Synthesized Peptide
VARCPSGVK

SEQ ID NO: 4081 - protein, 9 aa, Artificial Sequence
  Artificially Synthesized Peptide
LRELQLRSL

SEQ ID NO: 4082 - protein, 9 aa, Artificial Sequence
  Artificially Synthesized Peptide
WMALESILR

SEQ ID NO: 4083 - protein, 9 aa, Artificial Sequence
  Artificially Synthesized Peptide
VKPDLSYMP

SEQ ID NO: 4084 - protein, 9 aa, Artificial Sequence
  Artificially Synthesized Peptide
FKGTPTAEN

SEQ ID NO: 4085 - protein, 9 aa, Artificial Sequence
  Artificially Synthesized Peptide
YLSTDVGSC

SEQ ID NO: 4086 - protein, 9 aa, Artificial Sequence
  Artificially Synthesized Peptide
ILWKDIFHK

SEQ ID NO: 4087 - protein, 9 aa, Artificial Sequence
  Artificially Synthesized Peptide
VEECRVLQG

SEQ ID NO: 4088 - protein, 9 aa, Artificial Sequence
  Artificially Synthesized Peptide
FCPDPAPGA

SEQ ID NO: 4089 - protein, 9 aa, Artificial Sequence
  Artificially Synthesized Peptide
LELTYLPTN

SEQ ID NO: 4090 - protein, 9 aa, Artificial Sequence
  Artificially Synthesized Peptide
LTLIDTNRS

SEQ ID NO: 4091 - protein, 9 aa, Artificial Sequence
  Artificially Synthesized Peptide
YQDTILWKD

SEQ ID NO: 4092 - protein, 9 aa, Artificial Sequence
  Artificially Synthesized Peptide
VRPQPPSPR

SEQ ID NO: 4093 - protein, 9 aa, Artificial Sequence
  Artificially Synthesized Peptide
ICTIDVYMI

SEQ ID NO: 4094 - protein, 9 aa, Artificial Sequence
  Artificially Synthesized Peptide
FFCPDPAPG

SEQ ID NO: 4095 - protein, 9 aa, Artificial Sequence
  Artificially Synthesized Peptide
IRKYTMRRL

SEQ ID NO: 4096 - protein, 9 aa, Artificial Sequence
  Artificially Synthesized Peptide
VWSYGVTVW

SEQ ID NO: 4097 - protein, 9 aa, Artificial Sequence
  Artificially Synthesized Peptide
LQRLRIVRG

SEQ ID NO: 4098 - protein, 9 aa, Artificial Sequence
  Artificially Synthesized Peptide
VNARHCLPC

SEQ ID NO: 4099 - protein, 9 aa, Artificial Sequence
  Artificially Synthesized Peptide
ILHNGAYSL

SEQ ID NO: 4100 - protein, 9 aa, Artificial Sequence
  Artificially Synthesized Peptide
LGSQDLLNW

SEQ ID NO: 4101 - protein, 9 aa, Artificial Sequence
  Artificially Synthesized Peptide
YQGCQVVQG

SEQ ID NO: 4102 - protein, 9 aa, Artificial Sequence
  Artificially Synthesized Peptide
FRELVSEFS

SEQ ID NO: 4103 - protein, 9 aa, Artificial Sequence
  Artificially Synthesized Peptide
LQETELVEP

SEQ ID NO: 4104 - protein, 9 aa, Artificial Sequence
  Artificially Synthesized Peptide
LEDDDMGDL

SEQ ID NO: 4105 - protein, 9 aa, Artificial Sequence
  Artificially Synthesized Peptide
LLLALLPPG

SEQ ID NO: 4106 - protein, 9 aa, Artificial Sequence
  Artificially Synthesized Peptide
FGASCVTAC

SEQ ID NO: 4107 - protein, 9 aa, Artificial Sequence
  Artificially Synthesized Peptide
VGILLVVVL

SEQ ID NO: 4108 - protein, 9 aa, Artificial Sequence
  Artificially Synthesized Peptide
WSYGVTVWE

SEQ ID NO: 4109 - protein, 9 aa, Artificial Sequence
  Artificially Synthesized Peptide
LQGLGISWL

SEQ ID NO: 4110 - protein, 9 aa, Artificial Sequence
  Artificially Synthesized Peptide
LLNWCMQIA

SEQ ID NO: 4111 - protein, 9 aa, Artificial Sequence
  Artificially Synthesized Peptide
LRGQECVEE

SEQ ID NO: 4112 - protein, 9 aa, Artificial Sequence
  Artificially Synthesized Peptide
LGICLTSTV

SEQ ID NO: 4113 - protein, 9 aa, Artificial Sequence
  Artificially Synthesized Peptide
VGSCTLVCP

SEQ ID NO: 4114 - protein, 9 aa, Artificial Sequence
  Artificially Synthesized Peptide
VTVWELMTF

SEQ ID NO: 4115 - protein, 9 aa, Artificial Sequence
  Artificially Synthesized Peptide
LQPEQLQVF

SEQ ID NO: 4116 - protein, 9 aa, Artificial Sequence
  Artificially Synthesized Peptide
YVAPLTCSP

SEQ ID NO: 4117 - protein, 9 aa, Artificial Sequence
  Artificially Synthesized Peptide
LKGGVLIQR

SEQ ID NO: 4118 - protein, 9 aa, Artificial Sequence
  Artificially Synthesized Peptide
VEPLTPSGA

SEQ ID NO: 4119 - protein, 9 aa, Artificial Sequence
  Artificially Synthesized Peptide
VYMIMVKCW

SEQ ID NO: 4120 - protein, 9 aa, Artificial Sequence
  Artificially Synthesized Peptide
FEDNYALAV

SEQ ID NO: 4121 - protein, 9 aa, Artificial Sequence
  Artificially Synthesized Peptide
MPYGCLLDH

SEQ ID NO: 4122 - protein, 9 aa, Artificial Sequence
  Artificially Synthesized Peptide
VCAGGCARC

SEQ ID NO: 4123 - protein, 9 aa, Artificial Sequence
  Artificially Synthesized Peptide
VTGASPGGL

SEQ ID NO: 4124 - protein, 9 aa, Artificial Sequence
  Artificially Synthesized Peptide
LVTQLMPYG

SEQ ID NO: 4125 - protein, 9 aa, Artificial Sequence
  Artificially Synthesized Peptide
LHNQEVTAE

SEQ ID NO: 4126 - protein, 9 aa, Artificial Sequence
  Artificially Synthesized Peptide
LTPSGAMPN

SEQ ID NO: 4127 - protein, 9 aa, Artificial Sequence
  Artificially Synthesized Peptide
LLVVVLGVV

SEQ ID NO: 4128 - protein, 9 aa, Artificial Sequence
  Artificially Synthesized Peptide
VPWDQLFRN

SEQ ID NO: 4129 - protein, 9 aa, Artificial Sequence
  Artificially Synthesized Peptide
VVFGILIKR

SEQ ID NO: 4130 - protein, 9 aa, Artificial Sequence
  Artificially Synthesized Peptide
VTQLMPYGC

SEQ ID NO: 4131 - protein, 9 aa, Artificial Sequence
  Artificially Synthesized Peptide
VTSANIQEF

SEQ ID NO: 4132 - protein, 9 aa, Artificial Sequence
  Artificially Synthesized Peptide
VHRDLAARN

SEQ ID NO: 4133 - protein, 9 aa, Artificial Sequence
  Artificially Synthesized Peptide
VPLQRLRIV

SEQ ID NO: 4134 - protein, 9 aa, Artificial Sequence
  Artificially Synthesized Peptide
LLGICLTST

SEQ ID NO: 4135 - protein, 9 aa, Artificial Sequence
  Artificially Synthesized Peptide
LMPYGCLLD

SEQ ID NO: 4136 - protein, 9 aa, Artificial Sequence
  Artificially Synthesized Peptide
ILLVVVLGV

SEQ ID NO: 4137 - protein, 9 aa, Artificial Sequence
  Artificially Synthesized Peptide
LMTFGAKPY

SEQ ID NO: 4138 - protein, 9 aa, Artificial Sequence
  Artificially Synthesized Peptide
LLALLPPGA

SEQ ID NO: 4139 - protein, 9 aa, Artificial Sequence
  Artificially Synthesized Peptide
IPAREIPDL

SEQ ID NO: 4140 - protein, 9 aa, Artificial Sequence
  Artificially Synthesized Peptide
MVKCWMIDS

SEQ ID NO: 4141 - protein, 9 aa, Artificial Sequence
  Artificially Synthesized Peptide
IAHNQVRQV

SEQ ID NO: 4142 - protein, 9 aa, Artificial Sequence
  Artificially Synthesized Peptide
VLRENTSPK

SEQ ID NO: 4143 - protein, 9 aa, Artificial Sequence
  Artificially Synthesized Peptide
LDIDETEYH

SEQ ID NO: 4144 - protein, 9 aa, Artificial Sequence
  Artificially Synthesized Peptide
LGMEHLREV

SEQ ID NO: 4145 - protein, 9 aa, Artificial Sequence
  Artificially Synthesized Peptide
LGLEPSEEE

SEQ ID NO: 4146 - protein, 9 aa, Artificial Sequence
  Artificially Synthesized Peptide
YYWDQDPPE

SEQ ID NO: 4147 - protein, 9 aa, Artificial Sequence
  Artificially Synthesized Peptide
LWKDIFHKN

SEQ ID NO: 4148 - protein, 9 aa, Artificial Sequence
  Artificially Synthesized Peptide
YHADGGKVP

SEQ ID NO: 4149 - protein, 9 aa, Artificial Sequence
  Artificially Synthesized Peptide
LVSEFSRMA

SEQ ID NO: 4150 - protein, 9 aa, Artificial Sequence
  Artificially Synthesized Peptide
MARDPQRFV

SEQ ID NO: 4151 - protein, 9 aa, Artificial Sequence
  Artificially Synthesized Peptide
IQNEDLGPA

SEQ ID NO: 4152 - protein, 9 aa, Artificial Sequence
  Artificially Synthesized Peptide
VDAEEYLVP

SEQ ID NO: 4153 - protein, 9 aa, Artificial Sequence
  Artificially Synthesized Peptide
LFEDNYALA

SEQ ID NO: 4154 - protein, 9 aa, Artificial Sequence
  Artificially Synthesized Peptide
MALESILRR

SEQ ID NO: 4155 - protein, 9 aa, Artificial Sequence
  Artificially Synthesized Peptide
FPDEEGACQ

SEQ ID NO: 4156 - protein, 9 aa, Artificial Sequence
  Artificially Synthesized Peptide
LPTDCCHEQ

SEQ ID NO: 4157 - protein, 9 aa, Artificial Sequence
  Artificially Synthesized Peptide
VVKDVFAFG

SEQ ID NO: 4158 - protein, 9 aa, Artificial Sequence
  Artificially Synthesized Peptide
LPREYVNAR

SEQ ID NO: 4159 - protein, 9 aa, Artificial Sequence
  Artificially Synthesized Peptide
YSEDPTVPL

SEQ ID NO: 4160 - protein, 9 aa, Artificial Sequence
  Artificially Synthesized Peptide
YNTDTFESM

SEQ ID NO: 4161 - protein, 9 aa, Artificial Sequence
  Artificially Synthesized Peptide
LLQETELVE

SEQ ID NO: 4162 - protein, 9 aa, Artificial Sequence
  Artificially Synthesized Peptide
ILDEAYVMA

SEQ ID NO: 4163 - protein, 9 aa, Artificial Sequence
  Artificially Synthesized Peptide
VTAEDGTQR

SEQ ID NO: 4164 - protein, 9 aa, Artificial Sequence
  Artificially Synthesized Peptide
FDGDPASNT

SEQ ID NO: 4165 - protein, 9 aa, Artificial Sequence
  Artificially Synthesized Peptide
VKPDLSYMP

SEQ ID NO: 4166 - protein, 9 aa, Artificial Sequence
  Artificially Synthesized Peptide
FCPDPAPGA

SEQ ID NO: 4167 - protein, 9 aa, Artificial Sequence
  Artificially Synthesized Peptide
ILKETELRK

SEQ ID NO: 4168 - protein, 9 aa, Artificial Sequence
  Artificially Synthesized Peptide
LEDDDMGDL

SEQ ID NO: 4169 - protein, 9 aa, Artificial Sequence
  Artificially Synthesized Peptide
FDGDLGMGA

SEQ ID NO: 4170 - protein, 9 aa, Artificial Sequence
  Artificially Synthesized Peptide
FLPESFDGD

SEQ ID NO: 4171 - protein, 9 aa, Artificial Sequence
  Artificially Synthesized Peptide
FLQDIQEVQ

SEQ ID NO: 4172 - protein, 9 aa, Artificial Sequence
  Artificially Synthesized Peptide
LQPEQLQVF

SEQ ID NO: 4173 - protein, 9 aa, Artificial Sequence
  Artificially Synthesized Peptide
LPSETDGYV

SEQ ID NO: 4174 - protein, 9 aa, Artificial Sequence
  Artificially Synthesized Peptide
VPWDQLFRN

SEQ ID NO: 4175 - protein, 9 aa, Artificial Sequence
  Artificially Synthesized Peptide
VHRDLAARN

SEQ ID NO: 4176 - protein, 9 aa, Artificial Sequence
  Artificially Synthesized Peptide
FGPEADQCV

SEQ ID NO: 4177 - protein, 9 aa, Artificial Sequence
  Artificially Synthesized Peptide
LSTDVGSCT

SEQ ID NO: 4178 - protein, 9 aa, Artificial Sequence
  Artificially Synthesized Peptide
LLEDDDMGD

SEQ ID NO: 4179 - protein, 9 aa, Artificial Sequence
  Artificially Synthesized Peptide
LIDTNRSRA

SEQ ID NO: 4180 - protein, 9 aa, Artificial Sequence
  Artificially Synthesized Peptide
IDSECRPRF

SEQ ID NO: 4181 - protein, 9 aa, Artificial Sequence
  Artificially Synthesized Peptide
YLEDVRLVH

SEQ ID NO: 4182 - protein, 9 aa, Artificial Sequence
  Artificially Synthesized Peptide
VDLDDKGCP

SEQ ID NO: 4183 - protein, 9 aa, Artificial Sequence
  Artificially Synthesized Peptide
IHHNTHLCF

SEQ ID NO: 4184 - protein, 9 aa, Artificial Sequence
  Artificially Synthesized Peptide
AAPQPHPPP

SEQ ID NO: 4185 - protein, 9 aa, Artificial Sequence
  Artificially Synthesized Peptide
ASPETHLDM

SEQ ID NO: 4186 - protein, 9 aa, Artificial Sequence
  Artificially Synthesized Peptide
AHNQVRQVP

SEQ ID NO: 4187 - protein, 9 aa, Artificial Sequence
  Artificially Synthesized Peptide
LFRNPHQAL

SEQ ID NO: 4188 - protein, 9 aa, Artificial Sequence
  Artificial Peptide
YLEPAIAKY

SEQ ID NO: 4189 - protein, 10 aa, Artificial Sequence
  Artificial Peptide
FLPSDYFPSV

SEQ ID NO: 4190 - protein, 10 aa, Artificial Sequence
  Artificial Peptide
FLPSDYFPSV

SEQ ID NO: 4191 - protein, 10 aa, Artificial Sequence
  Artificial Peptide
FLPSDYFPSV

SEQ ID NO: 4192 - protein, 10 aa, Artificial Sequence
  Artificial Peptide
FLPSDYFPSV

SEQ ID NO: 4193 - protein, 10 aa, Artificial Sequence
  Artificial Peptide
FLPSDYFPSV

SEQ ID NO: 4194 - protein, 10 aa, Artificial Sequence
  Artificial Peptide
FLPSDYFPSV

SEQ ID NO: 4195 - protein, 9 aa, Artificial Sequence
  Artificial Peptide
YVIKVSARV

SEQ ID NO: 4196 - protein, 10 aa, Artificial Sequence
  Artificial Peptide
KVFPYALINK

SEQ ID NO: 4197 - protein, 9 aa, Artificial Sequence
  Artificial Peptide
AVDLYHFLK

SEQ ID NO: 4198 - protein, 10 aa, Artificial Sequence
  Artificial Peptide
KVFPYALINK

SEQ ID NO: 4199 - protein, 11 aa, Artificial Sequence
  Artificial Peptide
STLPETYVVRR

SEQ ID NO: 4200 - protein, 10 aa, Artificial Sequence
  Artificial Peptide
KVFPYALINK

SEQ ID NO: 4201 - protein, 9 aa, Artificial Sequence
  Artificial Peptide
AYIDNYNKF

SEQ ID NO: 4202 - protein, 9 aa, Artificial Sequence
  Artificial Peptide
APRTLVYLL

SEQ ID NO: 4203 - protein, 9 aa, Artificial Sequence
  Artificial Peptide
FPFKYAAAF

SEQ ID NO: 4204 - protein, 9 aa, Artificial Sequence
  Artificial Peptide
FPFKYAAAF

SEQ ID NO: 4205 - protein, 9 aa, Artificial Sequence
  Artificial Peptide
FPFKYAAAF

SEQ ID NO: 4206 - protein, 9 aa, Artificial Sequence
  Artificial Peptide
FPFKYAAAF

SEQ ID NO: 4207 - protein, 13 aa, Artificial Sequence
  Artificial Peptide
PKYVKQNTLKLAT

SEQ ID NO: 4208 - protein, 12 aa, Artificial Sequence
  Artificial Peptide
YKTIAFDEEARR

SEQ ID NO: 4209 - protein, 13 aa, Artificial Sequence
  Artificial Peptide
PKYVKQNTLKLAT

SEQ ID NO: 4210 - protein, 13 aa, Artificial Sequence
  Artificial Peptide
YARFSQTTLKQKT

SEQ ID NO: 4211 - protein, 13 aa, Artificial Sequence
  Artificial Peptide
YARFSQTTLKQKT

SEQ ID NO: 4212 - protein, 14 aa, Artificial Sequence
  Artificial Peptide
QYIKANSKFIGITE

SEQ ID NO: 4213 - protein, 14 aa, Artificial Sequence
  Artificial Peptide
QYIKANSKFIGITE

SEQ ID NO: 4214 - protein, 14 aa, Artificial Sequence
  Artificial Peptide
QYIKANSKFIGITE

SEQ ID NO: 4215 - protein, 14 aa, Artificial Sequence
  Artificial Peptide
QYIKANSKFIGITE

SEQ ID NO: 4216 - protein, 14 aa, Artificial Sequence
  Artificial Peptide
QYIKANSKFIGITE

SEQ ID NO: 4217 - protein, 15 aa, Artificial Sequence
  Artificial Peptide
EALIHQLKINPYVLS

SEQ ID NO: 4218 - protein, 14 aa, Artificial Sequence
  Artificial Peptide
QYIKANAKFIGITE

SEQ ID NO: 4219 - protein, 24 aa, Artificial Sequence
  Artificial Peptide
GRTQDENPVVHFFKNIVTPRTPPP

SEQ ID NO: 4220 - protein, 13 aa, Artificial Sequence
  Artificial Peptide
NGQIGNDPNRDIL

SEQ ID NO: 4221 - protein, 14 aa, Artificial Sequence
  Artificial Peptide
YARFQSQTTLKQKT

SEQ ID NO: 4222 - protein, 14 aa, Artificial Sequence
  Artificial Peptide
QYIKANSKFIGITE

SEQ ID NO: 4223 - protein, 14 aa, Artificial Sequence
  Artificial Peptide
QYIKANSKFIGITE

SEQ ID NO: 4224 - protein, 21 aa, Artificial Sequence
  Artificial Peptide
DIEKKIAKMEKASSVFNVVNS

SEQ ID NO: 4225 - protein, 16 aa, Artificial Sequence
  Artificial Peptide
GAVDSILGGVATYGAA

SEQ ID NO: 4226 - protein, 13 aa, Artificial Sequence
  Artificial Peptide
  VARIANT (1)..(1): Xaa = D-Alanine or L-Alanine
  VARIANT (3)..(3): Xaa = cyclohexylalanine, phenylalanine, or tyrosine
  VARIANT (13)..(13): Xaa = D-Alanine or L-Alanine
XKXVWANTLKAAX

SEQ ID NO: 4227 - protein, 9 aa, Artificial Sequence
  Artificial Peptide
ALCRWGLLL

SEQ ID NO: 4228 - protein, 9 aa, Artificial Sequence
  Artificial Peptide
  MISC_FEATURE (3)..(3): Xaa represents alpha-amino butyric acid
ALXRWGLLV

SEQ ID NO: 4229 - protein, 9 aa, Artificial Sequence
  Artificial Peptide
  MISC_FEATURE (3)..(3): Xaa represents alpha-amino butyric acid
AMXRWGLLV

SEQ ID NO: 4230 - protein, 9 aa, Artificial Sequence
  Artificial Peptide
VLIQRNPQL

SEQ ID NO: 4231 - protein, 9 aa, Artificial Sequence
  Artificial Peptide
VLIQRNPQV

SEQ ID NO: 4232 - protein, 9 aa, Artificial Sequence
  Artificial Peptide
KIFGSLAFL

SEQ ID NO: 4233 - protein, 9 aa, Artificial Sequence
  Artificial Peptide
KVFGSLAFV

SEQ ID NO: 4234 - protein, 9 aa, Artificial Sequence
  Artificial Peptide
KTFGSLAFV

SEQ ID NO: 4235 - protein, 9 aa, Artificial Sequence
  Artificial Peptide
KLFGSLAFV

SEQ ID NO: 4236 - protein, 9 aa, Artificial Sequence
  Artificial Peptide
SIISAVVGI

SEQ ID NO: 4237 - protein, 9 aa, Artificial Sequence
  Artificial Peptide
SLISAVVGV

SEQ ID NO: 4238 - protein, 9 aa, Artificial Sequence
  Artificial Peptide
VVLGVVFGI

SEQ ID NO: 4239 - protein, 9 aa, Artificial Sequence
  Artificial Peptide
VVLGVVFGV

SEQ ID NO: 4240 - protein, 9 aa, Artificial Sequence
  Artificial Peptide
VLLGVVFGV

SEQ ID NO: 4241 - protein, 10 aa, Artificial Sequence
  Artificial Peptide
YMIMVKCWMI

SEQ ID NO: 4242 - protein, 10 aa, Artificial Sequence
  Artificial Peptide
YLIMVKCWMV

SEQ ID NO: 4243 - protein, 10 aa, Artificial Sequence
  MISC_FEATURE (7)..(7): Xaa represents alpha-amino butyric acid
YLIMVKXWMV

SEQ ID NO: 4244 - protein, 8 aa, Artificial Sequence
  Artificial Peptide
VTACPYNY

SEQ ID NO: 4245 - protein, 11 aa, Artificial Sequence
  Artificial Peptide
ETHLDMLRHLY

SEQ ID NO: 4246 - protein, 11 aa, Artificial Sequence
  Artificial Peptide
ASCVTACPYNY

SEQ ID NO: 4247 - protein, 11 aa, Artificial Sequence
  Artificial Peptide
ETLEEITGYLY

SEQ ID NO: 4248 - protein, 11 aa, Artificial Sequence
  Artificial Peptide
EADQCVACAHY

SEQ ID NO: 4249 - protein, 9 aa, Artificial Sequence
  Artificial Peptide
HTDMLRHLY

SEQ ID NO: 4250 - protein, 9 aa, Artificial Sequence
  Artificial Peptide
GTDLFEDNY

SEQ ID NO: 4251 - protein, 9 aa, Artificial Sequence
  Artificial Peptide
ATCVTACPY

SEQ ID NO: 4252 - protein, 9 aa, Artificial Sequence
  Artificial Peptide
ETDEEITGY

SEQ ID NO: 4253 - protein, 9 aa, Artificial Sequence
  Artificial Peptide
VMDGVGSPY

SEQ ID NO: 4254 - protein, 9 aa, Artificial Sequence
  Artificial Peptide
LTDIDETEY

SEQ ID NO: 4255 - protein, 9 aa, Artificial Sequence
  Artificial Peptide
ATPLDSTFY

SEQ ID NO: 4256 - protein, 9 aa, Artificial Sequence
  Artificial Peptide
LTDSPQPEY

SEQ ID NO: 4257 - protein, 9 aa, Artificial Sequence
  Artificial Peptide
FTPAFDNLY

SEQ ID NO: 4258 - protein, 9 aa, Artificial Sequence
  Artificial Peptide
SPDFDNLYY

SEQ ID NO: 4259 - protein, 10 aa, Artificial Sequence
  Artificial Peptide
GTDMKLRLPY

SEQ ID NO: 4260 - protein, 10 aa, Artificial Sequence
  Artificial Peptide
PTDCCHEQCY

SEQ ID NO: 4261 - protein, 10 aa, Artificial Sequence
  Artificial Peptide
PTDCCHEQCA

SEQ ID NO: 4262 - protein, 10 aa, Artificial Sequence
  Artificial Peptide
ETMPNPEGRY

SEQ ID NO: 4263 - protein, 10 aa, Artificial Sequence
  Artificial Peptide
TLDEITGYLY

SEQ ID NO: 4264 - protein, 10 aa, Artificial Sequence
  Artificial Peptide
CTQIAKGMSY

SEQ ID NO: 4265 - protein, 10 aa, Artificial Sequence
  Artificial Peptide
FTDQSDVWSY

SEQ ID NO: 4266 - protein, 10 aa, Artificial Sequence
  Artificial Peptide
PADPLDSTFY

SEQ ID NO: 4267 - protein, 10 aa, Artificial Sequence
  Artificial Peptide
MTDLVDAEEY

SEQ ID NO: 4268 - protein, 10 aa, Artificial Sequence
  Artificial Peptide
FTPAFDNLYY

SEQ ID NO: 4269 - protein, 10 aa, Artificial Sequence
  Artificial Peptide
GTDTAENPEY

SEQ ID NO: 4270 - protein, 11 aa, Artificial Sequence
  Artificial Peptide
PTDCCHEQCAY

SEQ ID NO: 4271 - protein, 11 aa, Artificial Sequence
  Artificial Peptide
PTDCCHEQCAA

SEQ ID NO: 4272 - protein, 10 aa, Artificial Sequence
  Artificial Peptide
IVKGGVLIQR

SEQ ID NO: 4273 - protein, 10 aa, Artificial Sequence
  Artificial Peptide
IVKGGVLIQK

SEQ ID NO: 4274 - protein, 10 aa, Artificial Sequence
  Artificial Peptide
TVLWKDIFHK

SEQ ID NO: 4275 - protein, 10 aa, Artificial Sequence
  Artificial Peptide
TVLWKDIFHR

SEQ ID NO: 4276 - protein, 9 aa, Artificial Sequence
  Artificial Peptide
IVWKDIFHK

SEQ ID NO: 4277 - protein, 9 aa, Artificial Sequence
  Artificial Peptide
IVWKDIFHR

SEQ ID NO: 4278 - protein, 9 aa, Artificial Sequence
  Artificial Peptide
  MISC_FEATURE (3)..(3): Xaa represents alpha-amino butyric acid
  MISC_FEATURE (7)..(7): Xaa represents alpha-amino butyric acid
TVXAGGXAR

SEQ ID NO: 4279 - protein, 9 aa, Artificial Sequence
  Artificial Peptide
  MISC_FEATURE (3)..(3): Xaa represents alpha-amino butyric acid
  MISC_FEATURE (7)..(7): Xaa represents alpha-amino butyric acid
TVXAGGXAK

SEQ ID NO: 4280 - protein, 10 aa, Artificial Sequence
  Artificial Peptide
IVWLGLRSLR

SEQ ID NO: 4281 - protein, 10 aa, Artificial Sequence
  Artificial Peptide
IVWLGLRSLK

SEQ ID NO: 4282 - protein, 10 aa, Artificial Sequence
  Artificial Peptide
HVVPWDQLFR

SEQ ID NO: 4283 - protein, 10 aa, Artificial Sequence
  Artificial Peptide
HVVPWDQLFK

SEQ ID NO: 4284 - protein, 9 aa, Artificial Sequence
  Artificial Peptide
  MISC_FEATURE (1)..(1): Xaa represents alpha-amino butyric acid
  MISC_FEATURE (4)..(4): Xaa represents alpha-amino butyric acid
XVNXSQFLR

SEQ ID NO: 4285 - protein, 9 aa, Artificial Sequence
  Artifical Peptide
  MISC_FEATURE (1)..(1): Xaa represents alpha-amino butryic acid
  MISC_FEATURE (4)..(4): Xaa represents alpha-amino butryic acid
XVNXSQFLK

SEQ ID NO: 4286 - protein, 9 aa, Artificial Sequence
  Artificial Peptide
VVFGILIKK

SEQ ID NO: 4287 - protein, 9 aa, Artificial Sequence
  Artificial Peptide
VVRENTSPK

SEQ ID NO: 4288 - protein, 9 aa, Artificial Sequence
  Artificial Peptide
VVRENTSPR

SEQ ID NO: 4289 - protein, 9 aa, Artificial Sequence
  Artificial Peptide
LVDHVRENK

SEQ ID NO: 4290 - protein, 9 aa, Artificial Sequence
  Artificial Peptide
LVARNVLVK

SEQ ID NO: 4291 - protein, 9 aa, Artificial Sequence
  Artificial Peptide
LVARNVLVR

SEQ ID NO: 4292 - protein, 9 aa, Artificial Sequence
  Artificial Peptide
LVKSPNHVR

SEQ ID NO: 4293 - protein, 9 aa, Artificial Sequence
  Artificial Peptide
KVTDFGLAR

SEQ ID NO: 4294 - protein, 9 aa, Artificial Sequence
  Artificial Peptide
KVTDFGLAK

SEQ ID NO: 4295 - protein, 9 aa, Artificial Sequence
  Artificial Peptide
MVLESILRR

SEQ ID NO: 4296 - protein, 9 aa, Artificial Sequence
  Artificial Peptide
MVLESILRK

SEQ ID NO: 4297 - protein, 10 aa, Artificial Sequence
  Artificial Peptide
LVSEFSRMAK

SEQ ID NO: 4298 - protein, 10 aa, Artificial Sequence
  Artificial Peptide
AVPLDSTFYR

SEQ ID NO: 4299 - protein, 10 aa, Artificial Sequence
  Artificial Peptide
AVPLDSTFYK

SEQ ID NO: 4300 - protein, 9 aa, Artificial Sequence
  Artificial Peptide
ATCRWGLLV

SEQ ID NO: 4301 - protein, 9 aa, Artificial Sequence
  Artificial Peptide
AVCRWGLLV

SEQ ID NO: 4302 - protein, 9 aa, Artificial Sequence
  Artifical Peptide
  MISC_FEATURE (3)..(3): Xaa represents alpha-amino butryic acid
ATXRWGLLV

SEQ ID NO: 4303 - protein, 9 aa, Artificial Sequence
  Artificial Peptide
  MISC_FEATURE (3)..(3): Xaa represents alpha-amino butryic acid
AVXRWGLLV

SEQ ID NO: 4304 - protein, 9 aa, Artificial Sequence
  Artifical Peptide
  MISC_FEATURE (3)..(3): Xaa represents alpha-amino butryic acid
ALXRWGLLL

SEQ ID NO: 4305 - protein, 8 aa, Artificial Sequence
  Artificial Peptide
RWGLLLAL

SEQ ID NO: 4306 - protein, 8 aa, Artificial Sequence
  Artificial Peptide
SYMPIWKF

SEQ ID NO: 4307 - protein, 11 aa, Artificial Sequence
  Artificial Peptide
TYLPTNASLSF

SEQ ID NO: 4308 - protein, 11 aa, Artificial Sequence
  Artificial Peptide
PYVSRLLGICL

SEQ ID NO: 4309 - protein, 11 aa, Artificial Sequence
  Artificial Peptide
VWSYGVTVWEL

SEQ ID NO: 4310 - protein, 11 aa, Artificial Sequence
  Artificial Peptide
VYMIMVKCWMI

SEQ ID NO: 4311 - protein, 9 aa, Artificial Sequence
  Artificial Peptide
RYGLLLALF

SEQ ID NO: 4312 - protein, 9 aa, Artificial Sequence
  Artificial Peptide
TYLPTNASF

SEQ ID NO: 4313 - protein, 9 aa, Artificial Sequence
  Artificial Peptide
CYGLGMEHF

SEQ ID NO: 4314 - protein, 9 aa, Artificial Sequence
  Artificial Peptide
AYPDSLPDF

SEQ ID NO: 4315 - protein, 9 aa, Artificial Sequence
  Artificial Peptide
AYSLTLQGF

SEQ ID NO: 4316 - protein, 9 aa, Artificial Sequence
  Artificial Peptide
EYVNARHCF

SEQ ID NO: 4317 - protein, 9 aa, Artificial Sequence
  Artificial Peptide
PYVSRLLGF

SEQ ID NO: 4318 - protein, 9 aa, Artificial Sequence
  Artificial Peptide
KYMALESIF

SEQ ID NO: 4319 - protein, 9 aa, Artificial Sequence
  Artificial Peptide
RYTHQSDVF

SEQ ID NO: 4320 - protein, 9 aa, Artificial Sequence
  Artificial Peptide
VYSYGVTVF

SEQ ID NO: 4321 - protein, 9 aa, Artificial Sequence
  Artificial Peptide
SYGVTVWEF

SEQ ID NO: 4322 - protein, 9 aa, Artificial Sequence
  Artificial Peptide
VYMIMVKCF

SEQ ID NO: 4323 - protein, 9 aa, Artificial Sequence
  Artificial Peptide
RYRELVSEF

SEQ ID NO: 4324 - protein, 9 aa, Artificial Sequence
  Artificial Peptide
RYARDPQRF

SEQ ID NO: 4325 - protein, 10 aa, Artificial Sequence
  Artificial Peptide
LYISAWPDSF

SEQ ID NO: 4326 - protein, 10 aa, Artificial Sequence
  Artificial Peptide
GYSYLEDVRF

SEQ ID NO: 4327 - protein, 8 aa, Artificial Sequence
  Artificial Peptide
FPKANKEI

SEQ ID NO: 4328 - protein, 9 aa, Artificial Sequence
  Artificial Peptide
ALCRWGLLL

SEQ ID NO: 4329 - protein, 9 aa, Artificial Sequence
  Artificial Peptide
HLYQGCQVV

SEQ ID NO: 4330 - protein, 9 aa, Artificial Sequence
  Artificial Peptide
QLFEDNYAL

SEQ ID NO: 4331 - protein, 10 aa, Artificial Sequence
  Artificial Peptide
QLFEDNYALA

SEQ ID NO: 4332 - protein, 9 aa, Artificial Sequence
  Artificial Peptide
KIFGSLAFL

SEQ ID NO: 4333 - protein, 9 aa, Artificial Sequence
  Artificial Peptide
ILHNGAYSL

SEQ ID NO: 4334 - protein, 9 aa, Artificial Sequence
  Artificial Peptide
SIISAVVGI

SEQ ID NO: 4335 - protein, 10 aa, Artificial Sequence
  Artificial Peptide
VMAGVGSPYV

SEQ ID NO: 4336 - protein, 9 aa, Artificial Sequence
  Artificial Peptide
CLTSTVQLV

SEQ ID NO: 4337 - protein, 10 aa, Artificial Sequence
  Artificial Peptide
YMIMVKCWMI

SEQ ID NO: 4338 - protein, 9 aa, Artificial Sequence
  Artificial Peptide
ALCRWGLLL

SEQ ID NO: 4339 - protein, 9 aa, Artificial Sequence
  Artificial Peptide
  MISC_FEATURE (3)..(3): Xaa represents alpha-amino butyric acid
ALXRWGLLV

SEQ ID NO: 4340 - protein, 9 aa, Artificial Sequence
  Artificial Peptide
AMCRWGLLV

SEQ ID NO: 4341 - protein, 9 aa, Artificial Sequence
  Artificial Peptide
KIFGSLAFL

SEQ ID NO: 4342 - protein, 9 aa, Artificial Sequence
  Artificial Peptide
KLFGSLAFV

SEQ ID NO: 4343 - protein, 9 aa, Artificial Sequence
  Artificial Peptide
KVFGSLAFV

SEQ ID NO: 4344 - protein, 9 aa, Artificial Sequence
  Artificial Peptide
KTFGSLAFV

SEQ ID NO: 4345 - protein, 9 aa, Artificial Sequence
  Artificial Peptide
VVLGVVFGI

SEQ ID NO: 4346 - protein, 9 aa, Artificial Sequence
  Artificial Peptide
VLLGVVFGV

SEQ ID NO: 4347 - protein, 10 aa, Artificial Sequence
  Artificial Peptide
YMIMVKCWMI

SEQ ID NO: 4348 - protein, 10 aa, Artificial Sequence
  Artificial Peptide
  MISC_FEATURE (7)..(7): Xaa represents alpha-amino butyric acid
YLIMVKXWMV

SEQ ID NO: 4349 - protein, 9 aa, Artificial Sequence
  Artificial Peptide
YTAVVPLVY

SEQ ID NO: 4350 - protein, 10 aa, Artificial Sequence
  Artificial Peptide
FLPSDYFPSV

SEQ ID NO: 4351 - protein, 10 aa, Artificial Sequence
  Artificial Peptide
FLPSDYFPSV

SEQ ID NO: 4352 - protein, 10 aa, Artificial Sequence
  Artificial Peptide
FLPSDYFPSV

SEQ ID NO: 4353 - protein, 10 aa, Artificial Sequence
  Artificial Peptide
FLPSDYFPSV

SEQ ID NO: 4354 - protein, 10 aa, Artificial Sequence
  Artificial Peptide
FLPSDYFPSV

SEQ ID NO: 4355 - protein, 10 aa, Artificial Sequence
  Artificial Peptide
KVFPYALINK

SEQ ID NO: 4356 - protein, 10 aa, Artificial Sequence
  Artificial Peptide
KVFPYALINK

SEQ ID NO: 4357 - protein, 9 aa, Artificial Sequence
  Artificial Peptide
AYIDNYNKF

SEQ ID NO: 4358 - protein, 10 aa, Artificial Sequence
  Artificial Peptide
KVFPYALINK

SEQ ID NO: 4359 - protein, 10 aa, Artificial Sequence
  Artificial Peptide
KVFPYALINK

SEQ ID NO: 4360 - protein, 11 aa, Artificial Sequence
  Artificial Peptide
STLPETYVVRR

SEQ ID NO: 4361 - protein, 9 aa, Artificial Sequence
  Artificial Peptide
FTQAGYPAL

SEQ ID NO: 4362 - protein, 9 aa, Artificial Sequence
  Artificial Peptide
APRTLVYLL

SEQ ID NO: 4363 - protein, 8 aa, Artificial Sequence
  Artificial Peptide
FLKDYQLL

SEQ ID NO: 4364 - protein, 9 aa, Artificial Sequence
  Artificial Peptide
FRYNGLIHR

SEQ ID NO: 4365 - protein, 9 aa, Artificial Sequence
  Artificial Peptide
FPFKYAAAF

SEQ ID NO: 4366 - protein, 9 aa, Artificial Sequence
  Artificial Peptide
FPFKYAAAF

SEQ ID NO: 4367 - protein, 9 aa, Artificial Sequence
  Artificial Peptide
FPFKYAAAF

SEQ ID NO: 4368 - protein, 9 aa, Artificial Sequence
  Artificial Peptide
AEMGKYSFY

SEQ ID NO: 4369 - protein, 9 aa, Artificial Sequence
  Artificial Peptide
FPFKYAAAF

SEQ ID NO: 4370 - protein, 9 aa, Artificial Sequence
  Artificial Peptide
FPFKYAAAF

SEQ ID NO: 4371 - protein, 9 aa, Artificial Sequence
  Artificial Peptide
FPFKYAAAF

SEQ ID NO: 4372 - protein, 9 aa, Artificial Sequence
  Artificial Peptide
QYDDAVYKL

SEQ ID NO: 4373 - protein, 9 aa, Artificial Sequence
  Artificial Peptide
YRHDGGNVL

SEQ ID NO: 4374 - protein, 9 aa, Artificial Sequence
  Artificial Peptide
YRHDGGNVL

SEQ ID NO: 4375 - protein, 10 aa, Artificial Sequence
  Artificial Peptide
SGPSNTYPEI

SEQ ID NO: 4376 - protein, 8 aa, Artificial Sequence
  Artificial Peptide
RGYVFQGL

SEQ ID NO: 4377 - protein, 10 aa, Artificial Sequence
  Artificial Peptide
RGPYRAFVTI

SEQ ID NO: 4378 - protein, 9 aa, Artificial Sequence
  Artificial Peptide
KFNPMKTYI

SEQ ID NO: 4379 - protein, 12 aa, Artificial Sequence
  Artificial Peptide
IPQSLDSYWTSL

SEQ ID NO: 4380 - protein, 14 aa, Artificial Sequence
  Artificial Peptide
YPKYVKQNTLKLAT

SEQ ID NO: 4381 - protein, 16 aa, Artificial Sequence
  Artificial Peptide
VVHFFKNIVTPRTPPY

SEQ ID NO: 4382 - protein, 14 aa, Artificial Sequence
  Artificial Peptide
YAAFAAAKTAAAFA

SEQ ID NO: 4383 - protein, 12 aa, Artificial Sequence
  Artificial Peptide
YKTIAFDEEARR

SEQ ID NO: 4384 - protein, 14 aa, Artificial Sequence
  Artificial Peptide
YARFQSQTTLKQKT

SEQ ID NO: 4385 - protein, 14 aa, Artificial Sequence
  Artificial Peptide
YARFQRQTTLKAAA

SEQ ID NO: 4386 - protein, 14 aa, Artificial Sequence
  Artificial Peptide
YARFQSQTTLKQKT

SEQ ID NO: 4387 - protein, 14 aa, Artificial Sequence
  Artificial Peptide
YARFQSQTTLKQKT

SEQ ID NO: 4388 - protein, 14 aa, Artificial Sequence
  Artificial Peptide
QYIKANSKFIGITE

SEQ ID NO: 4389 - protein, 14 aa, Artificial Sequence
  Artificial Peptide
QYIKANSKFIGITE

SEQ ID NO: 4390 - protein, 14 aa, Artificial Sequence
  Artificial Peptide
QYIKANSKFIGITE

SEQ ID NO: 4391 - protein, 14 aa, Artificial Sequence
  Artificial Peptide
QYIKANSKFIGITE

SEQ ID NO: 4392 - protein, 14 aa, Artificial Sequence
  Artificial Peptide
QYIKANSKFIGITE

SEQ ID NO: 4393 - protein, 15 aa, Artificial Sequence
  Artificial Peptide
EALIHQLKINPYVLS

SEQ ID NO: 4394 - protein, 14 aa, Artificial Sequence
  Artificial Peptide
QYIKANAKFIGITE

SEQ ID NO: 4395 - protein, 14 aa, Artificial Sequence
  Artificial Peptide
QYIKANAKFIGITE

SEQ ID NO: 4396 - protein, 13 aa, Artificial Sequence
  Artificial Peptide
PKYVKQNTLKLAT

SEQ ID NO: 4397 - protein, 13 aa, Artificial Sequence
  Artificial Peptide
NGQIGNDPNRDIL

SEQ ID NO: 4398 - protein, 14 aa, Artificial Sequence
  Artificial Peptide
YARFQSQTTLKQKT

SEQ ID NO: 4399 - protein, 17 aa, Artificial Sequence
  Artificial Peptide
YAHAAHAAHAAHAAHAA

SEQ ID NO: 4400 - protein, 17 aa, Artificial Sequence
  Artificial Peptide
YAHAAHAAHAAHAAHAA

SEQ ID NO: 4401 - protein, 17 aa, Artificial Sequence
  Artificial Peptide
YAHAAHAAHAAHAAHAA

SEQ ID NO: 4402 - protein, 17 aa, Artificial Sequence
  Artificial Peptide
YNTDGSTDYGILQINSR

SEQ ID NO: 4403 - protein, 17 aa, Artificial Sequence
  Artificial Peptide
YAHAAHAAHAAHAAHAA

SEQ ID NO: 4404 - protein, 17 aa, Artificial Sequence
  Artificial Peptide
YAHAAHAAHAAHAAHAA

SEQ ID NO: 4405 - protein, 16 aa, Artificial Sequence
  Artificial Peptide
YLEDARRKKAIYEKKK

SEQ ID NO: 4406 - protein, 16 aa, Artificial Sequence
  Artificial Peptide
YLEDARRKKAIYEKKK

SEQ ID NO: 4407 - protein, 9 aa, Artificial Sequence
  Artificial Peptide
ALCRWGLLL

SEQ ID NO: 4408 - protein, 10 aa, Artificial Sequence
  Artificial Peptide
ALCRWGLLLA

SEQ ID NO: 4409 - protein, 9 aa, Artificial Sequence
  Artificial Peptide
HLYQGCQVV

SEQ ID NO: 4410 - protein, 9 aa, Artificial Sequence
  Artificial Peptide
QLFEDNYAL

SEQ ID NO: 4411 - protein, 10 aa, Artificial Sequence
  Artificial Peptide
QLFEDNYALA

SEQ ID NO: 4412 - protein, 10 aa, Artificial Sequence
  Artificial Peptide
SLTEILKGGV

SEQ ID NO: 4413 - protein, 9 aa, Artificial Sequence
  Artificial Peptide
VLIQRNPQL

SEQ ID NO: 4414 - protein, 9 aa, Artificial Sequence
  Artificial Peptide
KIFGSLAFL

SEQ ID NO: 4415 - protein, 9 aa, Artificial Sequence
  Artificial Peptide
ILHNGAYSL

SEQ ID NO: 4416 - protein, 9 aa, Artificial Sequence
  Artificial Peptide
ALIHHNTHL

SEQ ID NO: 4417 - protein, 9 aa, Artificial Sequence
  Artificial Peptide
GLACHQLCA

SEQ ID NO: 4418 - protein, 9 aa, Artificial Sequence
  Artificial Peptide
SIISAVVGI

SEQ ID NO: 4419 - protein, 9 aa, Artificial Sequence
  Artificial Peptide
VVLGVVFGI

SEQ ID NO: 4420 - protein, 9 aa, Artificial Sequence
  Artificial Peptide
RLLQETELV

SEQ ID NO: 4421 - protein, 9 aa, Artificial Sequence
  Artificial Peptide
ILDEAYVMA

SEQ ID NO: 4422 - protein, 10 aa, Artificial Sequence
  Artificial Peptide
VMAGVGSPYV

SEQ ID NO: 4423 - protein, 9 aa, Artificial Sequence
  Artificial Peptide
CLTSTVQLV

SEQ ID NO: 4424 - protein, 9 aa, Artificial Sequence
  Artificial Peptide
QLMPYGCLL

SEQ ID NO: 4425 - protein, 10 aa, Artificial Sequence
  Artificial Peptide
YMIMVKCWMI

SEQ ID NO: 4426 - protein, 9 aa, Artificial Sequence
  Artificial Peptide
YMIMVKCWM

SEQ ID NO: 4427 - protein, 9 aa, Artificial Sequence
  Artificial Peptide
ALCRWGLLL

SEQ ID NO: 4428 - protein, 9 aa, Artificial Sequence
  Artificial Peptide
HLYQGCQVV

SEQ ID NO: 4429 - protein, 9 aa, Artificial Sequence
  Artificial Peptide
QLFEDNYAL

SEQ ID NO: 4430 - protein, 10 aa, Artificial Sequence
  Artificial Peptide
QLFEDNYALA

SEQ ID NO: 4431 - protein, 9 aa, Artificial Sequence
  Artificial Peptide
KIFGSLAFL

SEQ ID NO: 4432 - protein, 9 aa, Artificial Sequence
  Artificial Peptide
ILHNGAYSL

SEQ ID NO: 4433 - protein, 9 aa, Artificial Sequence
  Artificial Peptide
SIISAVVGI

SEQ ID NO: 4434 - protein, 9 aa, Artificial Sequence
  Artificial Peptide
VVLGVVFGI

SEQ ID NO: 4435 - protein, 10 aa, Artificial Sequence
  Artificial Peptide
VMAGVGSPYV

SEQ ID NO: 4436 - protein, 9 aa, Artificial Sequence
  Artificial Peptide
CLTSTVQLV

SEQ ID NO: 4437 - protein, 10 aa, Artificial Sequence
  Artificial Peptide
YMIMVKCWMI

SEQ ID NO: 4438 - protein, 9 aa, Artificial Sequence
  Artificial Peptide
ALCRWGLLL

SEQ ID NO: 4439 - protein, 9 aa, Artificial Sequence
  Artificial Peptide
  MISC_FEATURE (3)..(3): Xaa represents alpha-amino butyric acid
ALXRWGLLV

SEQ ID NO: 4440 - protein, 9 aa, Artificial Sequence
  Artificial Peptide
AMCRWGLLV

SEQ ID NO: 4441 - protein, 9 aa, Artificial Sequence
  Artificial Peptide
KIFGSLAFL

SEQ ID NO: 4442 - protein, 9 aa, Artificial Sequence
  Artificial Peptide
KLFGSLAFV

SEQ ID NO: 4443 - protein, 9 aa, Artificial Sequence
  Artificial Peptide
KVFGSLAFV

SEQ ID NO: 4444 - protein, 9 aa, Artificial Sequence
  Artificial Peptide
KTFGSLAFV

SEQ ID NO: 4445 - protein, 9 aa, Artificial Sequence
  Artificial Peptide
VVLGVVFGI

SEQ ID NO: 4446 - protein, 9 aa, Artificial Sequence
  Artificial Peptide
VLLGVVFGV

SEQ ID NO: 4447 - protein, 10 aa, Artificial Sequence
  Artificial Peptide
YMIMVKCWMI

SEQ ID NO: 4448 - protein, 10 aa, Artificial Sequence
  Artificial Peptide
  MISC_FEATURE (7)..(7): Xaa represents alpha-amino butyric acid
YLIMVKXWMV

SEQ ID NO: 4449 - protein, 15 aa, Artificial Sequence
  Artificial Peptide
LCRWGLLLALLPPGA

SEQ ID NO: 4450 - protein, 15 aa, Artificial Sequence
  Artificial Peptide
RWGLLLALLPPGAAS

SEQ ID NO: 4451 - protein, 15 aa, Artificial Sequence
  Artificial Peptide
WGLLLALLPPGAAST

SEQ ID NO: 4452 - protein, 15 aa, Artificial Sequence
  Artificial Peptide
GTDMKLRLPASPETH

SEQ ID NO: 4453 - protein, 15 aa, Artificial Sequence
  Artificial Peptide
DMKLRLPASPETHLD

SEQ ID NO: 4454 - protein, 15 aa, Artificial Sequence
  Artificial Peptide
NLELTYLPTNASLSF

SEQ ID NO: 4455 - protein, 15 aa, Artificial Sequence
  Artificial Peptide
LTYLPTNASLSFLQD

SEQ ID NO: 4456 - protein, 15 aa, Artificial Sequence
  Artificial Peptide
TQLFEDNYALAVLDN

SEQ ID NO: 4457 - protein, 15 aa, Artificial Sequence
  Artificial Peptide
VCPLHNQEVTAEDGT

SEQ ID NO: 4458 - protein, 15 aa, Artificial Sequence
  Artificial Peptide
CKKIFGSLAFLPESF

SEQ ID NO: 4459 - protein, 15 aa, Artificial Sequence
  Artificial Peptide
LSVFQNLQVIRGRIL

SEQ ID NO: 4460 - protein, 15 aa, Artificial Sequence
  Artificial Peptide
LRELGSGLALIHHNT

SEQ ID NO: 4461 - protein, 15 aa, Artificial Sequence
  Artificial Peptide
KPDLSYMPIWKFPDE

SEQ ID NO: 4462 - protein, 15 aa, Artificial Sequence
  Artificial Peptide
ASPLTSIISAVVGIL

SEQ ID NO: 4463 - protein, 15 aa, Artificial Sequence
  Artificial Peptide
LTSIISAVVGILLVV

SEQ ID NO: 4464 - protein, 15 aa, Artificial Sequence
  Artificial Peptide
VVGILLVVVLGVVFG

SEQ ID NO: 4465 - protein, 15 aa, Artificial Sequence
  Artificial Peptide
LLVVVLGVVFGILIK

SEQ ID NO: 4466 - protein, 15 aa, Artificial Sequence
  Artificial Peptide
VLGVVFGILIKRRQQ

SEQ ID NO: 4467 - protein, 15 aa, Artificial Sequence
  Artificial Peptide
ETELVEPLTPSGAMP

SEQ ID NO: 4468 - protein, 15 aa, Artificial Sequence
  Artificial Peptide
VEPLTPSGAMPNQAQ

SEQ ID NO: 4469 - protein, 15 aa, Artificial Sequence
  Artificial Peptide
ETELRKVKVLGSGAF

SEQ ID NO: 4470 - protein, 15 aa, Artificial Sequence
  Artificial Peptide
GENVKIPVAIKVLRE

SEQ ID NO: 4471 - protein, 15 aa, Artificial Sequence
  Artificial Peptide
IKVLRENTSPKANKE

SEQ ID NO: 4472 - protein, 15 aa, Artificial Sequence
  Artificial Peptide
KEILDEAYVMAGVGS

SEQ ID NO: 4473 - protein, 15 aa, Artificial Sequence
  Artificial Peptide
DEAYVMAGVGSPYVS

SEQ ID NO: 4474 - protein, 15 aa, Artificial Sequence
  Artificial Peptide
SRLLGICLTSTVQLV

SEQ ID NO: 4475 - protein, 15 aa, Artificial Sequence
  Artificial Peptide
TVQLVTQLMPYGCLL

SEQ ID NO: 4476 - protein, 15 aa, Artificial Sequence
  Artificial Peptide
LLNWCMQIAKGMSYL

SEQ ID NO: 4477 - protein, 15 aa, Artificial Sequence
  Artificial Peptide
ITDFGLARLLDIDET

SEQ ID NO: 4478 - protein, 15 aa, Artificial Sequence
  Artificial Peptide
KVPIKWMALESILRR

SEQ ID NO: 4479 - protein, 15 aa, Artificial Sequence
  Artificial Peptide
PIKWMALESILRRRF

SEQ ID NO: 4480 - protein, 15 aa, Artificial Sequence
  Artificial Peptide
IKWMALESILRRRFT

SEQ ID NO: 4481 - protein, 15 aa, Artificial Sequence
  Artificial Peptide
GVTVWELMTFGAKPY

SEQ ID NO: 4482 - protein, 15 aa, Artificial Sequence
  Artificial Peptide
VWELMTFGAKPYDGI

SEQ ID NO: 4483 - protein, 15 aa, Artificial Sequence
  Artificial Peptide
GERLPQPPICTIDVY

SEQ ID NO: 4484 - protein, 15 aa, Artificial Sequence
  Artificial Peptide
QPPICTIDVYMIMVK

SEQ ID NO: 4485 - protein, 15 aa, Artificial Sequence
  Artificial Peptide
DVYMIMVKCWMIDSE

SEQ ID NO: 4486 - protein, 15 aa, Artificial Sequence
  Artificial Peptide
QGFFCPDPAPGAGGM

SEQ ID NO: 4487 - protein, 15 aa, Artificial Sequence
  Artificial Peptide
TDGYVAPLTCSPQPE

SEQ ID NO: 4488 - protein, 15 aa, Artificial Sequence
  Artificial Peptide
QPDVRPQPPSPREGP

SEQ ID NO: 4489 - protein, 15 aa, Artificial Sequence
  Artificial Peptide
PSTFKGTPTAENPEY

SEQ ID NO: 4490 - protein, 15 aa, Artificial Sequence
  Artificial Peptide
RWGLLLALLPPGAAS

SEQ ID NO: 4491 - protein, 15 aa, Artificial Sequence
  Artificial Peptide
WGLLLALLPPGAAST

SEQ ID NO: 4492 - protein, 15 aa, Artificial Sequence
  Artificial Peptide
NLELTYLPTNASLSF

SEQ ID NO: 4493 - protein, 15 aa, Artificial Sequence
  Artificial Peptide
LTYLPTNASLSFLQD

SEQ ID NO: 4494 - protein, 15 aa, Artificial Sequence
  Artificial Peptide
CKKIFGSLAFLPESF

SEQ ID NO: 4495 - protein, 15 aa, Artificial Sequence
  Artificial Peptide
LSVFQNLQVIRGRIL

SEQ ID NO: 4496 - protein, 15 aa, Artificial Sequence
  Artificial Peptide
ASPLTSIISAVVGIL

SEQ ID NO: 4497 - protein, 15 aa, Artificial Sequence
  Artificial Peptide
VLGVVFGILIKRRQQ

SEQ ID NO: 4498 - protein, 15 aa, Artificial Sequence
  Artificial Peptide
ETELRKVKVLGSGAF

SEQ ID NO: 4499 - protein, 15 aa, Artificial Sequence
  Artificial Peptide
GENVKIPVAIKVLRE

SEQ ID NO: 4500 - protein, 15 aa, Artificial Sequence
  Artificial Peptide
DEAYVMAGVGSPYVS

SEQ ID NO: 4501 - protein, 15 aa, Artificial Sequence
  Artificial Peptide
SRLLGICLTSTVQLV

SEQ ID NO: 4502 - protein, 15 aa, Artificial Sequence
  Artificial Peptide
TVQLVTQLMPYGCLL

SEQ ID NO: 4503 - protein, 15 aa, Artificial Sequence
  Artificial Peptide
LLNWCMQIAKGMSYL

SEQ ID NO: 4504 - protein, 15 aa, Artificial Sequence
  Artificial Peptide
KVPIKWMALESILRR

SEQ ID NO: 4505 - protein, 15 aa, Artificial Sequence
  Artificial Peptide
VWELMTFGAKPYDGI

SEQ ID NO: 4506 - protein, 15 aa, Artificial Sequence
  Artificial Peptide
QPPICTIDVYMIMVK

SEQ ID NO: 4507 - protein, 15 aa, Artificial Sequence
  Artificial Peptide
DVYMIMVKCWMIDSE

SEQ ID NO: 4508 - protein, 15 aa, Artificial Sequence
  Artificial Peptide
RLPASPETHLDMLRH

SEQ ID NO: 4509 - protein, 15 aa, Artificial Sequence
  Artificial Peptide
SLSFLQDIQEVQGYV

SEQ ID NO: 4510 - protein, 15 aa, Artificial Sequence
  Artificial Peptide
VLIAHNQVRQVPLQR

SEQ ID NO: 4511 - protein, 15 aa, Artificial Sequence
  Artificial Peptide
GTQLFEDNYALAVLD

SEQ ID NO: 4512 - protein, 15 aa, Artificial Sequence
  Artificial Peptide
DTILWKDIFHKNNQL

SEQ ID NO: 4513 - protein, 15 aa, Artificial Sequence
  Artificial Peptide
ALTLIDTNRSRACHP

SEQ ID NO: 4514 - protein, 15 aa, Artificial Sequence
  Artificial Peptide
KGPLPTDCCHEQCAA

SEQ ID NO: 4515 - protein, 15 aa, Artificial Sequence
  Artificial Peptide
LVTYNTDTFESMPNP

SEQ ID NO: 4516 - protein, 15 aa, Artificial Sequence
  Artificial Peptide
YNYLSTDVGSCTLVC

SEQ ID NO: 4517 - protein, 15 aa, Artificial Sequence
  Artificial Peptide
NQEVTAEDGTQRCEK

SEQ ID NO: 4518 - protein, 15 aa, Artificial Sequence
  Artificial Peptide
CYGLGMEHLREVRAV

SEQ ID NO: 4519 - protein, 15 aa, Artificial Sequence
  Artificial Peptide
SLAFLPESFDGDPAS

SEQ ID NO: 4520 - protein, 15 aa, Artificial Sequence
  Artificial Peptide
PESFDGDPASNTAPL

SEQ ID NO: 4521 - protein, 15 aa, Artificial Sequence
  Artificial Peptide
TAPLQPEQLQVFETL

SEQ ID NO: 4522 - protein, 15 aa, Artificial Sequence
  Artificial Peptide
LALIHHNTHLCFVHT

SEQ ID NO: 4523 - protein, 15 aa, Artificial Sequence
  Artificial Peptide
VHTVPWDQLFRNPHQ

SEQ ID NO: 4524 - protein, 15 aa, Artificial Sequence
  Artificial Peptide
WDQLFRNPHQALLHT

SEQ ID NO: 4525 - protein, 15 aa, Artificial Sequence
  Artificial Peptide
LQGLPREYVNARHCL

SEQ ID NO: 4526 - protein, 15 aa, Artificial Sequence
  Artificial Peptide
VTCFGPEADQCVACA

SEQ ID NO: 4527 - protein, 15 aa, Artificial Sequence
  Artificial Peptide
PSGVKPDLSYMPIWK

SEQ ID NO: 4528 - protein, 15 aa, Artificial Sequence
  Artificial Peptide
IWKFPDEEGACQPCP

SEQ ID NO: 4529 - protein, 15 aa, Artificial Sequence
  Artificial Peptide
HSCVDLDDKGCPAEQ

SEQ ID NO: 4530 - protein, 15 aa, Artificial Sequence
  Artificial Peptide
MRRLLQETELVEPLT

SEQ ID NO: 4531 - protein, 15 aa, Artificial Sequence
  Artificial Peptide
QMRILKETELRKVKV

SEQ ID NO: 4532 - protein, 15 aa, Artificial Sequence
  Artificial Peptide
AIKVLRENTSPKANK

SEQ ID NO: 4533 - protein, 15 aa, Artificial Sequence
  Artificial Peptide
NKEILDEAYVMAGVG

SEQ ID NO: 4534 - protein, 15 aa, Artificial Sequence
  Artificial Peptide
GMSYLEDVRLVHRDL

SEQ ID NO: 4535 - protein, 15 aa, Artificial Sequence
  Artificial Peptide
VRLVHRDLAARNVLV

SEQ ID NO: 4536 - protein, 15 aa, Artificial Sequence
  Artificial Peptide
ARLLDIDETEYHADG

SEQ ID NO: 4537 - protein, 15 aa, Artificial Sequence
  Artificial Peptide
ETEYHADGGKVPIKW

SEQ ID NO: 4538 - protein, 15 aa, Artificial Sequence
  Artificial Peptide
IKWMALESILRRRFT

SEQ ID NO: 4539 - protein, 15 aa, Artificial Sequence
  Artificial Peptide
CWMIDSECRPRFREL

SEQ ID NO: 4540 - protein, 15 aa, Artificial Sequence
  Artificial Peptide
FRELVSEFSRMARDP

SEQ ID NO: 4541 - protein, 15 aa, Artificial Sequence
  Artificial Peptide
FSRMARDPQRFVVIQ

SEQ ID NO: 4542 - protein, 15 aa, Artificial Sequence
  Artificial Peptide
FVVIQNEDLGPASPL

SEQ ID NO: 4543 - protein, 15 aa, Artificial Sequence
  Artificial Peptide
YRSLLEDDDMGDLVD

SEQ ID NO: 4544 - protein, 15 aa, Artificial Sequence
  Artificial Peptide
RSLLEDDDMGDLVDA

SEQ ID NO: 4545 - protein, 15 aa, Artificial Sequence
  Artificial Peptide
GDLVDAEEYLVPQQG

SEQ ID NO: 4546 - protein, 15 aa, Artificial Sequence
  Artificial Peptide
QGFFCPDPAPGAGGM

SEQ ID NO: 4547 - protein, 15 aa, Artificial Sequence
  Artificial Peptide
DLTLGLEPSEEEAPR

SEQ ID NO: 4548 - protein, 15 aa, Artificial Sequence
  Artificial Peptide
SDVFDGDLGMGAAKG

SEQ ID NO: 4549 - protein, 15 aa, Artificial Sequence
  Artificial Peptide
LQRYSEDPTVPLPSE

SEQ ID NO: 4550 - protein, 15 aa, Artificial Sequence
  Artificial Peptide
TVPLPSETDGYVAPL

SEQ ID NO: 4551 - protein, 15 aa, Artificial Sequence
  Artificial Peptide
KNGVVKDVFAFGGAV

SEQ ID NO: 4552 - protein, 15 aa, Artificial Sequence
  Artificial Peptide
QGGAAPQPHPPPAFS

SEQ ID NO: 4553 - protein, 15 aa, Artificial Sequence
  Artificial Peptide
DNLYYWDQDPPERGA

SEQ ID NO: 4554 - protein, 15 aa, Artificial Sequence
  Artificial Peptide
RWGLLLALLPPGAAS

SEQ ID NO: 4555 - protein, 15 aa, Artificial Sequence
  Artificial Peptide
WGLLLALLPPGAAST

SEQ ID NO: 4556 - protein, 15 aa, Artificial Sequence
  Artificial Peptide
LTYLPTNASLSFLQD

SEQ ID NO: 4557 - protein, 15 aa, Artificial Sequence
  Artificial Peptide
LSVFQNLQVIRGRIL

SEQ ID NO: 4558 - protein, 15 aa, Artificial Sequence
  Artificial Peptide
LALIHHNTHLCFVHT

SEQ ID NO: 4559 - protein, 15 aa, Artificial Sequence
  Artificial Peptide
WDQLFRNPHQALLHT

SEQ ID NO: 4560 - protein, 15 aa, Artificial Sequence
  Artificial Peptide
VLGVVFGILIKRRQQ

SEQ ID NO: 4561 - protein, 15 aa, Artificial Sequence
  Artificial Peptide
QMRILKETELRKVKV

SEQ ID NO: 4562 - protein, 15 aa, Artificial Sequence
  Artificial Peptide
DEAYVMAGVGSPYVS

SEQ ID NO: 4563 - protein, 15 aa, Artificial Sequence
  Artificial Peptide
SRLLGICLTSTVQLV

SEQ ID NO: 4564 - protein, 15 aa, Artificial Sequence
  Artificial Peptide
LLNWCMQIAKGMSYL

SEQ ID NO: 4565 - protein, 15 aa, Artificial Sequence
  Artificial Peptide
VRLVHRDLAARNVLV

SEQ ID NO: 4566 - protein, 15 aa, Artificial Sequence
  Artificial Peptide
ARLLDIDETEYHADG

SEQ ID NO: 4567 - protein, 15 aa, Artificial Sequence
  Artificial Peptide
KVPIKWMALESILRR

SEQ ID NO: 4568 - protein, 15 aa, Artificial Sequence
  Artificial Peptide
IKWMALESILRRRFT

SEQ ID NO: 4569 - protein, 15 aa, Artificial Sequence
  Artificial Peptide
VWELMTFGAKPYDGI

SEQ ID NO: 4570 - protein, 15 aa, Artificial Sequence
  Artificial Peptide
CWMIDSECRPRFREL

SEQ ID NO: 4571 - protein, 9 aa, Artificial Sequence
  DR7 preferred motif
  VARIANT (1)..(1): Met, Phe, Leu, Ile, Val, Trp, or Tyr
  VARIANT (5)..(5): May be any amino acid
  VARIANT (6)..(6): Ile, Val, Met, Ser, Ala, Cys, Thr, Pro, or Leu
  VARIANT (8)..(8): May be any amino acid
  VARIANT (9)..(9): Ile or Val
XMWAXXMXX

SEQ ID NO: 4572 - protein, 9 aa, Artificial Sequence
  DR7 deleterious motif
  VARIANT (1)..(1): May be any amino acid
  VARIANT (3)..(3): May be any amino acid
  VARIANT (5)..(6): May be any amino acid
  VARIANT (7)..(7): Gly, Arg, or Asp
XCXGXXXNG

SEQ ID NO: 4573 - protein, 9 aa, Artificial Sequence
  Artificial Peptide
FPTNASLSF

SEQ ID NO: 4574 - protein, 9 aa, Artificial Sequence
  Artificial Peptide
FPTNASLSI

SEQ ID NO: 4575 - protein, 10 aa, Artificial Sequence
  Artificial Peptide
FPTNASLSFI

SEQ ID NO: 4576 - protein, 10 aa, Artificial Sequence
  Artificial Peptide
FPTNASLSFL

SEQ ID NO: 4577 - protein, 9 aa, Artificial Sequence
  Artificial Peptide
FPLNNTTPI

SEQ ID NO: 4578 - protein, 9 aa, Artificial Sequence
  Artificial Peptide
FPLNNTTPV

SEQ ID NO: 4579 - protein, 10 aa, Artificial Sequence
  Artificial Peptide
FPGGLRELQI

SEQ ID NO: 4580 - protein, 10 aa, Artificial Sequence
  Artificial Peptide
FPMCKGSRCI

SEQ ID NO: 4581 - protein, 10 aa, Artificial Sequence
  Artificial Peptide
MPNPEGRYTI

SEQ ID NO: 4582 - protein, 10 aa, Artificial Sequence
  Artificial Peptide
FPNPEGRYTI

SEQ ID NO: 4583 - protein, 10 aa, Artificial Sequence
  Artificial Peptide
CPLHNQEVTI

SEQ ID NO: 4584 - protein, 10 aa, Artificial Sequence
  Artificial Peptide
FPCARVCYGL

SEQ ID NO: 4585 - protein, 8 aa, Artificial Sequence
  Artificial Peptide
WPDSLPDI

SEQ ID NO: 4586 - protein, 10 aa, Artificial Sequence
  Artificial Peptide
FPHQALLHTA

SEQ ID NO: 4587 - protein, 10 aa, Artificial Sequence
  Artificial Peptide
FPHQALLHTI

SEQ ID NO: 4588 - protein, 11 aa, Artificial Sequence
  Artificial Peptide
CPSGVKPDLSI

SEQ ID NO: 4589 - protein, 9 aa, Artificial Sequence
  Artificial Peptide
FPSGVKPDI

SEQ ID NO: 4590 - protein, 11 aa, Artificial Sequence
  Artificial Peptide
FPSGVKPDLSI

SEQ ID NO: 4591 - protein, 9 aa, Artificial Sequence
  Artificial Peptide
FPDLSYMPI

SEQ ID NO: 4592 - protein, 10 aa, Artificial Sequence
  Artificial Peptide
FPAEQRASPI

SEQ ID NO: 4593 - protein, 10 aa, Artificial Sequence
  Artificial Peptide
FPAEQRASPL

SEQ ID NO: 4594 - protein, 9 aa, Artificial Sequence
  Artificial Peptide
SPLTSIISI

SEQ ID NO: 4595 - protein, 9 aa, Artificial Sequence
  Artificial Peptide
FPLTSIISA

SEQ ID NO: 4596 - protein, 9 aa, Artificial Sequence
  Artificial Peptide
FPLTSIISI

SEQ ID NO: 4597 - protein, 10 aa, Artificial Sequence
  Artificial Peptide
FPLTSIISAI

SEQ ID NO: 4598 - protein, 10 aa, Artificial Sequence
  Artificial Peptide
FPLTSIISAV

SEQ ID NO: 4599 - protein, 11 aa, Artificial Sequence
  Artificial Peptide
FPLTSIISAVI

SEQ ID NO: 4600 - protein, 9 aa, Artificial Sequence
  Artificial Peptide
FPLTPSGAI

SEQ ID NO: 4601 - protein, 9 aa, Artificial Sequence
  Artificial Peptide
FPLTPSGAM

SEQ ID NO: 4602 - protein, 10 aa, Artificial Sequence
  Artificial Peptide
FPSGAMPNQI

SEQ ID NO: 4603 - protein, 11 aa, Artificial Sequence
  Artificial Peptide
MPNQAQMRILI

SEQ ID NO: 4604 - protein, 9 aa, Artificial Sequence
  Artificial Peptide
FPNQAQMRI

SEQ ID NO: 4605 - protein, 10 aa, Artificial Sequence
  Artificial Peptide
FPNQAQMRII

SEQ ID NO: 4606 - protein, 10 aa, Artificial Sequence
  Artificial Peptide
FPNQAQMRIL

SEQ ID NO: 4607 - protein, 8 aa, Artificial Sequence
  Artificial Peptide
FPKANKEI

SEQ ID NO: 4608 - protein, 9 aa, Artificial Sequence
  Artificial Peptide
FPKANKEII

SEQ ID NO: 4609 - protein, 9 aa, Artificial Sequence
  Artificial Peptide
FPKANKEIL

SEQ ID NO: 4610 - protein, 8 aa, Artificial Sequence
  Artificial Peptide
FPYVSRLL

SEQ ID NO: 4611 - protein, 10 aa, Artificial Sequence
  Artificial Peptide
FPYVSRLLGI

SEQ ID NO: 4612 - protein, 11 aa, Artificial Sequence
  Artificial Peptide
MPYGCLLDHVI

SEQ ID NO: 4613 - protein, 8 aa, Artificial Sequence
  Artificial Peptide
FPIKWMAI

SEQ ID NO: 4614 - protein, 8 aa, Artificial Sequence
  Artificial Peptide
FPIKWMAL

SEQ ID NO: 4615 - protein, 8 aa, Artificial Sequence
  Artificial Peptide
KPYDGIPI

SEQ ID NO: 4616 - protein, 8 aa, Artificial Sequence
  Artificial Peptide
FPYDGIPA

SEQ ID NO: 4617 - protein, 8 aa, Artificial Sequence
  Artificial Peptide
FPYDGIPI

SEQ ID NO: 4618 - protein, 11 aa, Artificial Sequence
  Artificial Peptide
FPYDGIPAREI

SEQ ID NO: 4619 - protein, 9 aa, Artificial Sequence
  Artificial Peptide
FPQPPICTI

SEQ ID NO: 4620 - protein, 11 aa, Artificial Sequence
  Artificial Peptide
FPRFRELVSEI

SEQ ID NO: 4621 - protein, 10 aa, Artificial Sequence
  Artificial Peptide
FPASPLDSTF

SEQ ID NO: 4622 - protein, 10 aa, Artificial Sequence
  Artificial Peptide
FPASPLDSTI

SEQ ID NO: 4623 - protein, 11 aa, Artificial Sequence
  Artificial Peptide
FPLDSTFYRSI

SEQ ID NO: 4624 - protein, 11 aa, Artificial Sequence
  Artificial Peptide
FPLDSTFYRSL

SEQ ID NO: 4625 - protein, 9 aa, Artificial Sequence
  Artificial Peptide
FPLAPSEGI

SEQ ID NO: 4626 - protein, 9 aa, Artificial Sequence
  Artificial Peptide
FPTHDPSPI

SEQ ID NO: 4627 - protein, 9 aa, Artificial Sequence
  Artificial Peptide
FPTHDPSPL

SEQ ID NO: 4628 - protein, 9 aa, Artificial Sequence
  Artificial Peptide
FPSETDGYI

SEQ ID NO: 4629 - protein, 9 aa, Artificial Sequence
  Artificial Peptide
FPSETDGYV

SEQ ID NO: 4630 - protein, 11 aa, Artificial Sequence
  Artificial Peptide
PPSPREGPLPI

SEQ ID NO: 4631 - protein, 11 aa, Artificial Sequence
  Artificial Peptide
FPSPREGPLPI

SEQ ID NO: 4632 - protein, 9 aa, Artificial Sequence
  Artificial Peptide
FPREGPLPI

SEQ ID NO: 4633 - protein, 10 aa, Artificial Sequence
  Artificial Peptide
FPREGPLPAI

SEQ ID NO: 4634 - protein, 9 aa, Artificial Sequence
  Artificial Peptide
FPLPAARPA

SEQ ID NO: 4635 - protein, 9 aa, Artificial Sequence
  Artificial Peptide
FPLPAARPI

SEQ ID NO: 4636 - protein, 9 aa, Artificial Sequence
  Artificial Peptide
FPAARPAGI

SEQ ID NO: 4637 - protein, 11 aa, Artificial Sequence
  Artificial Peptide
FPAARPAGATI

SEQ ID NO: 4638 - protein, 11 aa, Artificial Sequence
  Artificial Peptide
FPAARPAGATL

SEQ ID NO: 4639 - protein, 8 aa, Artificial Sequence
  Artificial Peptide
FPGKNGVI

SEQ ID NO: 4640 - protein, 8 aa, Artificial Sequence
  Artificial Peptide
RYGLLALF

SEQ ID NO: 4641 - protein, 1255 aa, Homo sapiens
MELAALCRWGLLLALLPPGAASTQVCTGTDMKLRLPASPETHLDMLRHLYQGCQVVQGNLELTYLPTNASLSFLQDIQEVQGYVLIAHNQVRQVPLQRLRIVRGTQLFEDNYALAVLDNGDPLNNTTPVTGASPGGLRELQLRSLTEILKGGVLIQRNPQLCYQDTILWKDIFHKNNQLALTLIDTNRSRACHPCSPMCKGSRCWGESSEDCQSLTRTVCAGGCARCKGPLPTDCCHEQCAAGCTGPKHSDCLACLHFNHSGICELHCPALVTYNTDTFESMPNPEGRYTFGASCVTACPYNYLSTDVGSCTLVCPLHNQEVTAEDGTQRCEKCSKPCARVCYGLGMEHLREVRAVTSANIQEFAGCKKIFGSLAFLPESFDGDPASNTAPLQPEQLQVFETLEEITGYLYISAWPDSLPDLSVFQNLQVIRGRILHNGAYSLTLQGLGISWLGLRSLRELGSGLALIHHNTHLCFVHTVPWDQLFRNPHQALLHTANRPEDECVGEGLACHQLCARGHCWGPGPTQCVNCSQFLRGQECVEECRVLQGLPREYVNARHCLPCHPECQPQNGSVTCFGPEADQCVACAHYKDPPFCVARCPSGVKPDLSYMPIWKFPDEEGACQPCPINCTHSCVDLDDKGCPAEQRASPLTSIISAVVGILLVVVLGVVFGILIKRRQQKIRKYTMRRLLQETELVEPLTPSGAMPNQAQMRILKETELRKVKVLGSGAFGTVYKGIWIPDGENVKIPVAIKVLRENTSPKANKEILDEAYVMAGVGSPYVSRLLGICLTSTVQLVTQLMPYGCLLDHVRENRGRLGSQDLLNWCMQIAKGMSYLEDVRLVHRDLAARNVLVKSPNHVKITDFGLARLLDIDETEYHADGGKVPIKWMALESILRRRFTHQSDVWSYGVTVWELMTFGAKPYDGIPAREIPDLLEKGERLPQPPICTIDVYMIMVKCWMIDSECRPRFRELVSEFSMRARDPQRFVVIQNEDLGPASPLDSTFYRSLLEDDDMGDLVDAEEYLVPQQGFFCPDPAPGAGGMVHHRHRSSSTRSGGGDLTLGLEPSEEEAPRSPLAPSEGAGSDVFDGDLGMGAAKGLQSLPTHDPSPLQRYSEDPTVPLPSETDGYVAPLTCSPQPEYVNQPDVRPQPPSPREGPLPAARPAGATLERPKTLSPGKNGVVKDVFAFGGAVENPEYLTPQGGAAPQPHPPPAFSPAFDNLYYWDQDPPERGAPPSTFKGTPTAENPEYLGLDVPV
